(19) United States
(12) Patent Application Publication
(10) Pub. No.: US 2003/0224380 A1
(43) Pub. Date: Dec. 4, 2003

(54) Genes and polymorphisms on chromosome 10 associated with Alzheimer's disease and other neurodegenerative diseases

(75) Inventors: Kenneth David Becker, San Diego, CA (US); Gonul Velicelebi, San Diego, CA (US); Kathryn J. Ellliott, San Diego, CA (US); Xin Wang, San Diego, CA (US); Rudolph E. Tanzi, Hull, MA (US); Lars Bertram, Brighton, MA (US); Aleister J. Saunders, Philadelphia, PA (US); Kristina M. Mullin, south Boston, MA (US); Andrew Joseph Sampson, Dayton, OH (US)

Correspondence Address: HELLER EHRMAN WHITE & MCAULIFFE LLP, 4350 LA JOLLA VILLAGE DRIVE, 7TH FLOOR, SAN DIEGO, CA, 92122-1246, US

(73) Assignee: The General Hospital Corporation

(21) Appl. No.: 10/282,174

(22) Filed: Oct. 25, 2002

Related U.S. Application Data
(60) Provisional application No. 60/339,525, filed on Oct. 25, 2001.
(60) Provisional application No. 60/338,010, filed on Nov. 8, 2001.
(60) Provisional application No. 60/336,929, filed on Nov. 8, 2001.
(60) Provisional application No. 60/338,363, filed on Nov. 9, 2001.
(60) Provisional application No. 60/337,052, filed on Dec. 4, 2001.
(60) Provisional application No. 60/368,919, filed on Mar. 28, 2002.
(60) Provisional application No. 60/348,065, filed on Oct. 25, 2001.
(60) Provisional application No. 60/336,983, filed on Nov. 2, 2001.

(51) Int. Cl. C12Q 1/68

(52) U.S. Cl. 435/6

(57) ABSTRACT

Probes, primers and kits for detection of polymorphisms in genes involved in neurodegenerative disease are provided. Methods based on detecting such polymorphisms for prognosticating, determining the occurrence, profiling drug response and drug discovery are also provided.

### RELATED APPLICATIONS

[0001] Benefit of priority under § 119(e) is claimed to U.S. Provisional Application Serial No. 60/339,525, filed Oct. 25, 2001, entitled “Genes and Polymorphisms on Chromosome 10 Associates with Alzheimer's Disease and Other Neurodegenerative Diseases”; U.S. Provisional Application Serial No. 60/338,010, filed Nov. 8, 2001; entitled “Genes and Polymorphisms on Chromosome 10 Associated with Alzheimer's Disease and Other Neurodegenerative Diseases”; U.S. Provisional Application Serial No. 60/336,929, filed Nov. 8, 2001, entitled “Polymorphic Urokinase Plasminogen Activator Genes as Genetic Markers for Neurodegenerative Disease”; U.S. Provisional Application Serial No. 60/338,363, filed Nov. 9, 2001, entitled “Polymorphic Urokinase Plasminogen Activator Genes and Methods Using the Same”; U.S. Provisional Application Serial No. 60/337,052, filed Dec. 4, 2001, entitled “Polymorphic Urokinase Plasminogen Activator Genes and Methods Using the Same”; and U.S. Provisional Application Serial No. 60/368,919, filed Mar. 28, 2002, entitled “Genes and Polymorphisms on Chromosome 10 Associated with Alzheimer's Disease and Other Neurodegenerative Diseases”, the subject matter of which is incorporated herein in its entirety. The subject matter of each of the following applications is also incorporated herein by reference in its entirety: U.S. Provisional Application Serial No. 60/348,065, filed Oct. 25, 2001, entitled “Genetic Markers for Alzheimer's Disease and Methods of Using the Same”, and U.S. Provisional Application Serial No. 60/336,983, filed Nov. 2, 2001, entitled “Genetic Markers for Alzheimer's Disease and Methods of Using the Same”; U.S. patent application entitled “Genetic Markers for Alzheimer's Disease and Methods Using the Same”, filed Oct. 25, 2002, Attorney Docket No. 37481-3312; and International PCT Application entitled “Genes and Polymorphisms on Chromosome 10 Associated with Alzheimer's Disease and Other Neurodegenerative Diseases”, filed Oct. 25, 2002, attorney Docket No. 37481-3308PC.

[0002] Subject matter of this application was conducted with support from the United States Government under Grant Nos. 1RO1MH60009 (NIMH) and 5P5OAG05134 (NIA). Thus, the U.S. Government may retain certain rights in such subject matter.

### FIELD OF THE INVENTION

[0003] The field of the invention involves genes and polymorphisms that are associated with neurodegenerative diseases. Probes, primers and kits for detection of polymorphisms are provided. Methods based on detecting such polymorphisms for prognosticating, determining the risk for or occurrence of neurodegenerative disease, profiling drug response and drug discovery are also provided. The invention also relates to polymorphisms of the IDE, KNSL1, PLAU, SNCG, LIPA and TNFRSF6 genes and prolymorphic proteins encoded by these genes.

### BACKGROUND OF THE INVENTION

[0004] Neurodegenerative diseases are genetically complex, heterogeneous disorders that have many different etiologies. Many are hereditary, some are secondary to toxic or metabolic processes, and others result from infections or have no known etiology. Neurodegenerative diseases are often age associated, chronic and progressive without known treatment modalities. These diseases are characterized by abnormalities of relatively specific regions of the brain and populations of neurons. The affected cell groups in the different diseases determine the clinical phenotype of the illnesses. Examples of neurodegenerative diseases include Motor Neuron diseases such as Amyotrophic Lateral Sclerosis (ALS), Dementing Illnesses including Alzheimer's disease (AD), Parkinsonian syndromes such as Parkinson's disease (PD), Huntington's disease (HD), and Prion diseases.

[0005] Individuals with dementing illnesses usually present with gradual loss of memory followed by progressive deterioration of thought, judgement, language skills, visual-spatial perception, mood, and the ability to manage personal affairs. These patients become severely demented and typically die of intercurrent medical illnesses, such as pneumonia. There are many causes of dementia including primary cortical degenerative disorders (AD, Pick's disease, and Lewy body disorders), cerebrovascular disease (multiinfarct dementia), sub-cortical degenerative disorders (Multiple System Atrophy, Huntington's disease and Progressive Supranuclear Palsy), infections (Neurosyphilis, AIDS), prion disorders, toxic and metabolic disorders (alcohol, hypothyroidism), tumors, and brain injury.

[0006] Parkinsonian symptoms can be present in several neurodegenerative disorders. The classical Parkinsonian syndrome is Parkinson's disease (PD), which is characterized by slowness of voluntary movement (Bradykinesia), rigidity, and tremor. This disorder generally affects individuals over 60 year of age and affects males and females equally. Cognitive deficits (dementia) are present in only a minority of patients, perhaps up to 10%. Parkinsonian syndromes were also recognized in the early twentieth century following the influenza pandemic and are referred to as Post Encephalitic Parkinsonism. Many survivors of the viral infection developed parkinsonism months to years later and at an earlier age of onset than PD, although the neuropathological changes have some similarities to PD. Experimental parkinsonism has been created by inadvertent exposure to the mitochondrial toxin called MPTP, an analogue of meperidine which was inadvertently made as a designer drug of abuse.

[0007] The vast majority of PD patients are sporadic although several autosomal dominant pedigrees of parkinsonism have been identified. Recently, it was shown that a protein called α-synuclein is present in Lewy bodies and that a few families with familial PD have a point mutation in the gene on chromosome 4 which encodes α-synuclein.

[0008] The neuropathological changes of PD are loss of the pigmented neurons in the substantia nigra, loss of pigment in the remaining neurons, and the presence of intracytoplasmic inclusions called Lewy bodies. This selective neuronal degeneration results in abnormalities of dopamine in the striatum and loss of dopamine in the basal ganglia motor circuit. Lewy bodies are found in the substantia nigra (midbrain) and locus coeruleus (pons). Lewy bodies are eosinophilic spherical inclusions which often have a clear halo surrounding them, pushing aside the neuromelanin pigment. Ultrastructurally, Lewy bodies are filamentous structures.

[0009] While many PD patients with dementia have no morphological abnormalities to account for the dementia, there is a subset of patients with dementia and parkinsonism who have widespread Lewy bodies in the brainstem and the cortex. This disease has been referred to as Diffuse Lewy Body disease. It has been shown that many patients with dementia and the morphological findings of typical Alzheimer's disease also have Lewy bodies in specific neuronal populations.

[0010] In monkeys and human intravenous drug users, the systemic administration of MPTP (1-methyl-4-phenyl-1,2,3,6-tetrahydropyridine) produces parkinsonian features. MPTP is converted to the toxic metabolite MPP+ which is taken up by dopamine systems and apparently inhibits the mitochondrial complex I leading to ATP depletion and generation of oxygen free radicals. This has led to theories that oxidative stress (i.e., the generation of free radicals) may play a role in PD. There have also been hypotheses suggesting age, other toxic processes, and other genetic factors to explain the pathogenesis of PD.

[0011] Huntington's disease (HD) is an autosomal dominant neurodegenerative disorder which is characterized by involuntary movements (chorea), dementia, and behavioral abnormalities. HD usually occurs in individuals over 40 years of age with abnormal movements and behavioral changes and over time the chorea progresses and rigidity and abnormal eye movements develop. In the end stage, nearly all HD patients develop cognitive impairments (dementia), personality changes, and a variety of psychological symptoms including irritability and depression, and eventually become mute.

[0012] Initially, genetic linkage was established between DNA markers and the distal region of the short arm of chromosome 4. This linkage was further defined by the demonstration of the HD gene IT15. The protein that is encoded by this gene is called huntingtin which contains a CAG triplet repeat which is expanded in the disorder. HD patients have greater than 37 CAG triplet repeats whereas normal alleles have less than 37. The extent of expansion is correlated with both age of onset and severity of disease such that juvenile onset HD patient have extremely large CAG expansions (up to 100) and very severe disease. Huntingtin is expressed in nearly all cells of the body, yet HD is primarily a disorder of a specific subset of neurons in the brain.

[0013] HD shows selective neuronal vulnerability. Medium spiny neurons in the striatum are lost whereas medium aspiny neurons in the same location are spared. The gross features of HD include marked atrophy of the striatum (caudate and putamen) and generalized cortical atrophy with decreased brain weight. The medium spiny neurons are principally GABAergic. In the neocortex, there is loss of neurons in layers III, V and VI. Recently, it has been shown that neurons in HD patients, both in affected neuronal populations and those not currently understood to be involved in the disease, have intranuclear inclusions which consist of cleaved fragments of mutant huntingtin with the expanded triplet repeat. The mechanism of this intranuclear aggregation of mutant huntingtin is unknown although it appears to be a universal feature in the triplet repeat disorders which are a topic of intense research.

[0014] A group of invariably fatal neurodegenerative diseases are caused by pathogenic agents termed prions. Prion diseases take the form of genetic, infectious, or sporadic disorders, all of which are believed to involve mutations in the genes which encode the prion protein and/or prion-like proteins. Prion diseases include the animal diseases such as bovine spongiform encephalopathy (BSE), scrapie of sheep, transmissible mink encephalopathy (TME), chronic wasting disease (CWD), and feline spongiform encephalopathy (FSE). There are also a number on known human prion diseases including iatrogenic (i), variant (v), familial (f), and sporadic (s) Creutzfedt-Jakob disease (CJD); Kuru; Gerstmann-Straussler-Scheinker disease (GSS); and fatal familial insomnia (FFI).

[0015] Prion diseases are characterized by rapidly progressive dementia sometimes combined with cerebellar ataxia. Morphological changes associated with prion diseases include spongiform degeneration and astrocytic gliosis. Most cases of CJD and a few cases of GSS can be classified as sporadic. In these patients, mutations of the PrP gene are not found. How prions causing disease arise in patients with sporadic forms is unknown, however, hypotheses include horizontal transmission of prions from humans or animals, somatic mutation of the PrP gene, and spontaneous conversion of PrP^{c} into PrP^{Sc}. More than 20 mutations of the PrP gene (Prnp) are now known to cause inherited human prion diseases, and significant genetic linkage has been established for five of these mutations. The P102L mutation was the first PrP mutation to be genetically linked to GSS and is found in many GSS families throughout the world.

[0016] The particular dementing illness of Alzheimer's disease (AD) is a devastating neurodegenerative progressive disorder, which is the predominant cause of dementia in people over 65 years of age. Clinical symptoms of the disease typically begin with subtle short term memory problems. As the disease progresses, the difficulty with memory, language and orientation worsen to the point of interfering with the ability of the person to function independently. Other symptoms, which are variable, include myoclonus and seizures. Duration of AD from the first symptoms of memory loss until death is 10 years on average. AD always results in death, often from respiratory-related illness.

[0017] The pathology in AD is confined exclusively to the central nervous system (CNS). The AD brain is characterized by the presence of amyloid deposits and neurofibrillary tangles (NFT). Amyloid deposits are also found associated with the vascular system of the CNS and as focal deposits in the parenchyma. The major molecular component of an amyloid deposit is a highly hydrophobic peptide called A-beta peptide. For example, in Alzheimer's disease the β-amyloid precursor protein (APP), a Cu2+ binding protein, undergoes cleavage during oxidative stress. Cleavage of APP can result in the formation of the A-beta peptide fragment which is thought to be responsible for the formation of senile plaques, a pathological hallmark of Alzheimer's disease. This peptide aggregates into filaments in an anti-beta-pleated structure. Aggregated A-beta may be the primary agent responsible for disease progression, as the accumulation of aggregates is toxic to the brain (Small et al. (1999) J. Neurochem. 73:443-449). Although A-beta is the major component of AD amyloid, other proteins have also been found associated with the amyloid, e.g., alpha-1-anti-chymotrypsin (Abraham et al. (1988) Cell 52:487-501), cathepsin D (Cataldo et al. (1990) Brain Res. 513:181-192), non-amyloid component protein (Ueda et al. (1993) Proc. Natl. Acad. Sci. U.S.A. 90:11282-11286), apolipoprotein E (apoE) (Namba et al. (1991) Brain Res. 541:163-166; Wisniewski & Frangione (1992) Neurosci. Lett. 135:235-238; Strittmatter et al. (1993) Proc. Natl. Acad. Sci. U.S.A. 90:1977-1981), apolipoprotein J (Choi-Mura et al. (1992) Acta Neuropathol. 83:260-264; McGeer et al. (1992) Brain Res. 579:337-341), heat shock protein 70 (Hamos et al. (1991) Neurology 41:345-350), complement components (McGeer & Rogers (1992) Neurology 43:447-449), alpha2-macroglobin (Strauss et al. (1992) Lab. Invest. 66:223-230), interleukin-6 (Strauss et al. (1992) Lab. Invest. 66:223-230), proteoglycans (Snow et al. (1987) Lab. Invest. 58:454-458), and serum amyloid P (Coria et al. (1988) Lab. Invest. 58:454-458).

[0018] Plaques are often surrounded by astrocytes and activated microglial cells expressing immune-related proteins, such as the MHC class II glycoproteins HLA-DR, HLA-DP, and HLA-DQ, as well as MHC class I glycoproteins, interleukin-2 (IL-2) receptors, and IL-1. Also surrounding many plaques are dystrophic neurites, which are nerve endings containing abnormal filamentous structures.

[0019] The characteristic Alzheimer's NFTs consist of abnormal filaments bundled together in neuronal cell bodies. “Ghost” NFTs are also observed in AD brains, which presumably mark the location of dead neurons. Other neuropathological features include granulovascular changes, neuronal loss, gliosis and the variable presence of Lewy bodies.

[0020] The destructive process of the disease is evident on a gross level in the AD brain to the extent that in late-stage AD, ventricular enlargement and shrinkage of the brain can be observed by magnetic resonance imaging. The cells remaining at autopsy are grossly different from those of a normal brain and the brain is characterized by extensive gliosis and neuronal loss. Neurons which were possibly involved in initiating events, are absent; and other cell types, such as the activated microglial cells and astrocytes, have gene expression patterns not observed in the normal brain. Thus, the amyloid plaque structures and NFTs observed at autopsy are most likely the end-products of a lengthy disease process, far removed from the initiating events of AD.

[0021] Accordingly, attempts to use biochemical methods to identify key proteins and genes in the initiating steps of the disease are hampered by the fact that it is not possible to actually observe these critical initiating events. Rather, biochemical dissection of the AD brain at autopsy is akin to molecular archeology, attempting to reconstruct the pathogenic pathway by comparing the normal brain to the end-stage disease brain.

[0022] Determining the genetic basis of neurodegenerative diseases, such as AD, is also made difficult as these are genetically complex and heterogeneous disorders. Also, because AD is relatively common in the elderly, clustering of cases in a family may occur by chance, representing possible confounding non-allelic genetic heterogeneity, or etiologic heterogeneity with genetic and non-genetic cases co-existing in the same kindred. In addition, the diagnosis of AD is also confounded with other dementing diseases and conditions common in the elderly, including dementia-causing conditions such as strokes, microvascular disease, brain tumors, thyroid dysfunction, drug reactions, severe depression and a host of other conditions that can cause intellectual deficits in the elderly. Furthermore, many of the pathological features of AD are not unique to the disease and also occur in the brains of normal aged individuals and are associated with diseases such as Guam Parkinson disease, dementia pugilistica and progressive supranuclear palsy. For example, the twisted filaments that form NFTs also occur in certain tangles associated with other diseases such as Pick's disease.

[0023] Despite these problems, it has been found that roughly 40% of early-onset AD (less than about 65 years) is attributable to missense mutations in three genes (APP, PSEN1 and PSEN2). However, early-onset cases only account for approximately 1-2% of all AD cases. The genetic basis of late onset AD has proven more difficult to disentangle (D. Blacker, R. E. Tanzi (1998) Arch Neurol 55:294). Substantial evidence has suggested that inherited genetic defects are involved in late-onset AD. Families with multiple late-onset AD cases have been described (Bird et al. (1989) Ann. Neurol 25:12-25; Heston & White (1 978) Behavior Genet. 8:315-331; Pericak-Vance et al. (1988) Exp. Neurol. 102:271-279).

[0024] To date, only one genetic risk factor, a common polymorphism in the apolipoprotein E (APOE) gene, has been replicated in independent samples in late-onset AD (L. A. Farrer et al. (1997) JAMA 278:1349; D. Blacker et al. (1997) Neurology 48:139). However, approximately half of AD cases do not have the APOE epsilon 4 allele found in several other families with high incidence of AD, including the Volga German (VG) kindreds (Brousseau et al. (1994) Neurology 342; Kuusisto et al. (1994) Brit. Med. J. 309:363; Tsai et al. (1994) Am. J. Hum. Genet. 54:643; Liddel et al. (1994) J. Med. Genet. 31:197; Cook et al. (1979) Neurology 29:1402-1412; Bird et al. (1988) Ann. Neurol. 23:25-31; Bird et al. (1989) Ann. Neurol. supra). The known AD loci have been excluded as possible causes of the discrepancy (Schellenberg et al. (1992) Science 258:668; Lannfelt et al. (1993) Nat. Genet. 4:218-219; Van Duijn et al. (1994) Am. J Hum. Genet. 55:714-727; Schellenberg et al. (1988) Science 241:1507; Schellenberg et al. (1991) Am. J. Hum. Genet. 48:563; Schellenberg et al. (1991) Am. J. Hum. Genet. 49:511-517 (1991); Kamino et al. (1992) Am. J. Hum. Genet. 51:998; Schellenberg et al. (1993) Am J. Hum. Genet. 53:619; Schellenberg et al. (1992) Ann. Neurol. 31:223; Yu et al. (1994) Am. Hum. Genet. 54:631). Also, there is evidence that genetic factors other than APOE contribute to the risk for late onset AD. A study modeling AD as a quantitative trait estimated at least four additional genetic susceptibility loci for the disease (E. Daw et al. (2000) Am J Hum Genet 66:196).

### SUMMARY OF THE INVENTION

[0025] An understanding of the genes that are responsible for AD and other neurodegenerative disorders, along with useful genetic markers and mutations in these genes, will allow for methods of detecting an altered level of risk and/or determining the occurrence of AD and other neurodegenerative diseases and the development of therapeutics that target these alterations. Therefore, provided herein are methods for using polymorphic markers to detect a predisposition to, or protection against, the manifestation of or the occurrence of neurodegenerative disease, such as Alzheimer's disease, and the like. The ultimate goals are the elucidation of pathological pathways, developing new diagnostic assays, determining genetic profiles for positive responses to therapeutic drugs, identifying new potential drug targets and identifying new drug candidates. Based on proximity to linkage peaks on chromosome 10 as determined by genetic mapping of DNA samples from Alzheimer's disease patients and their families, positional candidate genes for neurodegenerative disease, including Alzheimer's disease, have been identified. In a particular embodiment, the methods provided herein are useful in diagnosing late-onset Alzheimer's disease (LOAD). These candidate genes include uPA (Urokinase plasminogen activator; also referred to as PLAU), SNCG (human γ-synuclein), IDE (insulin-degrading enzyme), KNSL1 (human Kinesin-like protein 1), TNFRSF6 (Tumor Necrosis Factor Receptor-SF6) and LIPA (lysosomal acid lypase). High throughput DNA sequencing identified polymorphic regions, including single nucleotide polymorphisms, in these genes and surrounding regions in chromosome 10.

[0026] Provided herein are polymorphisms of the IDE, KNSL1, SNCG, TNFRSF6, LIPA and uPA (gene symbol is PLAU) genes and alleles of these genes. In particular embodiments, the polymorphisms are in the human IDE, KNSL1, SNCG, TNFRSF6, LIPA and uPA genes. Polymorphisms of these genes, individually and/or in combination, may be associated with a disease or disorder. Polymorphisms of these genes may be associated with one or more of an IDE-, KNSL1-, SNCG-, TNFRSF6-, LIPA- and/or uPA-mediated disease or disorder. For example, polymorphisms of these genes, individually and/or in combination, may be associated with a disease or disorder involving proteolysis, protein or peptide degradation, and/or interactions between the proteins encoded by these genes and other molecules. Polymorphisms are provided herein that are associated, individually and/or in combination, with a neurodegenerative disease, such as, for example, Alzheimer's disease.

[0027] Methods for Determining a Predisposition for or the Occurrence of Neurodegenerative Disease

[0028] Methods are provided for determining a predisposition to or occurrence of a neurodegenerative disease in a subject, which include the step of detecting in a target nucleic acid obtained from the subject the presence or absence of an allelic variant of one or more polymorphic regions one or more of a uPA, SNCG, IDE, LIPA, TNFRSF6 or KNSL1 gene, wherein the presence of an allelic variant is indicative of a predisposition for or the occurrence of neurodegenerative disease, such as Alzheimer's disease. The polymorphic region can be a single nucleotide polymorphism (SNP), a single-nucleotide insertion or deletion, a multiple-nucleotide insertion or deletion, a repeat of nucleotides, and the like. A collection of allelic variants at multiple polymorphic regions of one or more genes on a chromosome (haplotype), is often more informative than a single allelic variant in indicating a predisposition to disease. Thus, the present methods for determining a predisposition for or occurrence of neurodegenerative disease, such as Alzheimer's disease, include examination of more than one polymorphic region of a given gene locus. Each allelic variant may be assayed individually or simultaneously using multiplex assay methods.

[0029] For each of the methods provided herein, polymorphic regions for the SNCG gene include, but are not limited to, nucleotide positions 560, 590, 617, 645, 915, 987, 1723, 1943, 1950, 3151, 3178, 3189, 3284, 3779, 4156, 4276, 4311, 4552, 4976, 4995, 5019, 5025, 5112, 5136, 5517, 5421, 5648, 2533, 3371, 4627, 4727, 4813 and 5200 of SEQ ID NO: 73, or the complements thereof. In particular embodiments, the nucleotide(s): at position 560 is G or A, at position 590 is A or C, at position 617 is C or T, at position 645 is G or A, at position 915 is T or G, at position 987 is C or A, at position 1723 is A or G, at position 1943 is G or C, at position 1950 is G or A, at position 3151 is A or G, at position 3178 is T or C, at position 3189 is T or C, at position 3284 is G or A, at position 3779 is T or position 3779 is deleted, at position 4156 corresponds to a single nucleotide G that is either inserted or not inserted, at position 4276 is T or A, at position 4311 is C or T, at position 4552 is T or A, at position 4976 is C or position 4976 is deleted, at position 4995 is C or G, at position 5019 is C or T, at position 5025 is C or A, at position 5112 is T or A, at position 5136 is T or A, at position 5517 is T or C, at position 2533 is T or G, at position 3371 is A or C, at position 4627 is T or G, at position 4727 is A or G, at position 4813 is A or C, and at position 5200 is G or C.

[0030] For each of the methods provided herein, polymorphic regions for the IDE gene include, but are not limited to, nucleotide positions 2456, 3279, 3407, 42943, 62498, 69586, 107395, 112114, 116662, 17095, 17242, 33590, 38903, 43391, 45017, 68906, 68973, 73772, 74084, 83024, 83104, 89301, 105060, 108489, 111914, 113142, 113591, 114683, 117803 and 124565 of SEQ ID NO: 187, or the complements thereof. In particular embodiments, the nucleotide(s) in SEQ ID NO: 187: at position 2456 is T or G, at position 3279 is T or C, at position 3407 is C or T, at position 42943 is T or C, at position 62498 is T or C, at position 69586 is T or C, at position 107395 is G or A, at position 112114 is G or A, and at position 116662 is T or A.

[0031] Additional polymorphic regions for the IDE gene include, but are not limited to, SEQ ID NO: 484 nucleotide positions 820, 7066, 11758, 21270, 22225, 29294, 33452, 33708, 36982, 54862, 77786, 80594, 84792, 84997, 86682, 86857, 88511, 90437, 90593, 91650, 91870, 91878, 92011, 93618, 94344, 94714, 95671, 96324, 97302, 97370, 98253, 98276, 98385, 98646, 98814, 99597, 100378, 101029, 101265, 102465, 103289, 103967, 105793, 106076, 106453, 106600, 106995, 107851, 108434, 109096, 109399, 109483, 110870, 111189, 111972, 112627, 112629, 112631, 113407, 114444, 114482, 115473, 116681, 117226, 117600, 117802, 118223, 120011, 122260, 123165, 123424, 124352, 124501, 124692, 125113, 125159, 126568, 127166, 127598, 127600, 127609, 127614, 127623, 127662, 128053, 128261, 128289, 128291, 128393, 129444, 6078, 7106, 11758, 18267, 19581, 30078, 54862, 73841, 83448, 80304, 98276, 117802 and 129124, or the complements thereof. In particular embodiments, the complementary nucleotide(s) in SEQ ID NO: 484: at position 820 is A or T, at position 7066 is A or G, at position 11758 is T or C, at position 21270 is T or G, at position 22225 is A or T, at position 29294 is C or T, at position 33452 is G or T, at position 33708 is G or A, at position 36982 is C or T, at position 54862 is A or G, at position 77786 is C or A, at position 80594 is G or A, at position 84792 is T or C, at position 84997 is G or T, at position 86682 is C or T, at position 86857 is T or A, at position 88511 is A or G, at position 90437 is G or T, at position 90593 is G or A, at position 91650 is T or C, at position 91870 is G or A, at position 91878 is G or A, at position 92011 is C or T, at position 93618 is T or C, at position 94344 is C or T, at position 94714 is A or G, at position 95671 is A or G, at position 96324 is A or G, at position 97302 is G or A, at position 97370 is G or A, at position 98253 is T or C, at position 98276 is C or T, at position 98385 is A or G, at position 98646 is T or A, at position 98814 is G or A, at position 99597 is C or T, at position 100378 is T or C, at position 101029 is G or A, at position 101265 is C or T, at position 102465 is C or G, at position 103289 is T or G, at position 103967 is C or T, at position 105793 is A or G, at position 106076 is G or T, at position 106453 is C or T, at position 106600 is A or G, at position 106995 is G or A, at position 107851 is C or T, at position 108434 is G or C, at position 109096 is C or T, at position 109399 is C or T, at position 109483 is T or G, at position 110870 is G or A, at position 111189 is A or G, at position 111972 is G or A, at position 112627 is A or T, at position 112629 is A or T, at position 112631 is T or A, at position 113407 is C or G, at position 114444 is C or G, at position 114482 is G or C, at position 115473 is C or position 115473 is deleted, at position 116681 is G or T, at position 117226 is A or T, at position 117600 is A or G, at position 117802 is C or T, at position 118223 is G or C, at position 120011 is C or T, at position 122260 is A or G, at position 123165 is A or G, at position 123424 is G or A, at position 124352 is A or G, at position 124501 is C or T, at position 124692 is A or G, at position 125113 is T or A, at position 125159 is G or A, at position 126568 is G or C, at position 127166 is C or G, at position 127598 is T or C, at position 127600 is T or C, at position 127609 is T or C, at position 127614 is T or C, at position 127623 is T or C, at position 127662 is G or A, at position 128053 is G or A, at position 128261 is a repeat of -TAAA- occurring 6, 7, or 8 times beginning at position 128261, at position 128289 is A or T, at position 128291 is T or G, at position 128393 is T or G, at position 129444 is C or T.

[0032] In a further embodiment, the one or more polymorphic regions of the IDE gene is a haplotype comprising particular allelic variants at nucleotides 2456, 3279, 3407 and 42943 of SEQ ID NO: 187. In one embodiment of this haplotype, the nucleotide in IDE at position 2456 of SEQ ID NO: 187 is G, at position 3279 of SEQ ID NO: 187 is T, at position 3407 of SEQ ID NO: 187 is T, and at position 42943 of SEQ ID NO: 187 is T. In another embodiment of this haplotype, the nucleotide in IDE at position 2456 of SEQ ID NO: 187 is T, at position 3279 of SEQ ID NO: 187 is T, at position 3407 of SEQ ID NO: 187 is C, and at position 42943 of SEQ ID NO: 187 is T. In still a further embodiment, the nucleotide in IDE at position 2456 of SEQ ID NO: 187 is T, at position 3279 of SEQ ID NO: 187 is T, at position 3407 of SEQ ID NO: 187 is C, and at position 42943 of SEQ ID NO: 187 is C. In yet another embodiment, the nucleotide in IDE at position 2456 of SEQ ID NO: 187 is T, at position 3279 of SEQ ID NO: 187 is C, at position 3407 of SEQ ID NO: 187 is C, and at position 42943 of SEQ ID NO: 187 is C. In another embodiment, the one or more polymorphic regions of the IDE gene is a SNP corresponding to nucleotide 112114 of SEQ ID NO: 187, wherein the allelic variant is A.

[0033] For each of the methods provided herein, polymorphic regions for the KNSL1 gene include, but are not limited to, nucleotide positions 300, 1152, 14235, 15104, 20815, 35719, 36738-36739, 41015, 42125, 45083, 45887, 56706, 56887, 58524, 62661 and 63802 of SEQ ID NO: 348, or the complements thereof. In particular embodiments, the nucleotide(s): at position 300 corresponds to a dinucleotide -CA- that is either inserted or not inserted beginning at position 300, at position 1152 is G or T, at position 14235 corresponds to a single nucleotide T that is either inserted or not inserted, at position 15104 is A or G, at position 20815 is T or C, at position 35719 is T or C, at positions 36738-36739 is a dinucleotide corresponding to CA or AC, at position 41015 corresponds to the oligonucleotide -AATTT- that is either inserted or not inserted beginning at position 41015, at position 42125 is T or G, at position 45083 is C or T, at position 45887 is G or C, at position 56706 is C or T, at position 56887 is A or G, at position 58524 is C or T, at position 62661 is C or T, and at position 63802 is A or C.

[0034] Additional polymorphic regions for the KNSL1 gene include, but are not limited to, SEQ ID NO: 484 nucleotide positions 130876, 131378, 131616, 131620, 131688, 131998, 132004, 132370, 132697, 132968, 133355, 133806, 134030, 134291, 134661, 137087, 137142, 138396, 140665, 140736, 141173, 142056, 142777, 143025, 143729, 144484, 146181, 147051, 147322, 147707, 147842, 148080, 149026, 149044, 149389, 150003, 150384, 150454, 150686, 151343, 151961, 152119, 153791, 154328, 154513, 154639, 155049, 155114, 158040, 158895, 191284, 192272, 192698, 193706, 132370, 136968, 139284, 159167, 159403, 178748, 180149 and 180153, or the complement thereof. In particular embodiments, the nucleotide(s) in SEQ ID NO: 484: at position 130876 is T or C, at position 131378 is G or A, at position 131616 is G or A, at position 131620 is G or A, at position 131688 is T or G, at positions 131998-131203 are CTTTTC- or positions 131998-131203 are deleted, at position 132004 is either a 9, 16, 21, 26, or 29 base pair poly-T repeat beginning at nucleotide 132004, at position 132370 is A or G, at position 132697 is A or G, at position 132968 is C or T, at position 133355 is either a 6, 7 or 8 base pair poly-T repeat beginning at nucleotide 133355, at position 133806 is T or G, at position 134030 is G or A, at position 134291 is A or G, at position 134661 is G or A, at position 137087 is A or G, at position 137142 is G or A, at position 138396 is C or T, at position 140665 is T or G, at position 140736 is A or G, at position 141173 is A or G, at position 142056 is T or C, at position 142777 corresponds to a dinucleotide -AG- that is either inserted or not inserted beginning at position 142777, at position 143025 is G or T, at position 143729 is C or A, at position 144484 is T or A, at position 146181 is T or A, at position 147051 is G or A, at position 147322 is C or T, at position 147707 is G or T, at positions 147842-147845 are -AGTT- or positions 147842-147845 are deleted, at position 148080 is C or T, at position 149026 is either a 17, 18, 19 or 22 base pair -AC- repeat beginning at nucleotide 149026, at position 149044 is either a 22, 24, 28, 30, 32 or 36 base pair -GT- repeat beginning at nucleotide 149044, at position 149389 is A or G, at position 150003 is G or A, at position 150384 is G or T, at position 150454 is C or T, at position 150686 is G or T, at position 151343 is C or T, at position 151961 is C or T, at position 152119 is C or T, at position 153791 is C or G, at position 154328 is A or T, at position 154513 is C or A, at position 154639 is G or A, at position 155049 is T or C, at position 155114 is T or C, at position 158040 is C or A, at position 158895 is G or A, at position 191284 is C or T, at position 192272 is C or T, at position 192698 is A or T, at position 193706 is T or A.

[0035] In a further embodiment, the one or more polymorphic regions of the KNSL1 gene is a haplotype comprising particular allelic variants at nucleotides 132370, 133355, 147842 and 178981 of SEQ ID NO: 484. In one embodiment, the nucleotide(s) in KNSL1: at position 132370 of SEQ ID NO: 484 is A; between positions 133354-133355 of SEQ ID NO: 484 is a 6, 7 or 8 base pair poly-T insertion corresponding to -TTTTTT(T)(T)-; at positions 147842-147845 of SEQ ID NO: 484 is the 4 base pair insertion corresponding to -AGTT-; and between positions 178980-178981 of SEQ ID NO: 484 is the 5 base pair insertion corresponding to -AATTT-. In particular embodiments, the poly-T insertion can be 6 base pairs corresponding to -TTTTTT-; the poly-T insertion can be 7 base pairs corresponding to -TTTTTTT-; or the poly-T insertion can be 8 base pairs corresponding to -TTTTTTTT-.

[0036] For each of the methods provided herein, polymorphic regions for the LIPA gene include, but are not limited to, nucleotide positions 1197, 1307-1309, 1841, 1852, 2075, 6063, 6173, 6194, 7820, 25283, 28453-28465, 28543, 28746, 29904, 37861, 39834, 40018, 7219, 8242, 10114, 10606, 10688, 10729, 11559, 12031, 14497, 14729, 21145, 21329, 21404, 21429, 22246, 22354, 22621, 23802 and 25969 of SEQ ID NO: 468, or the complements thereof. In particular embodiments, the nucleotide(s): at position 1197 is C or G, the nucleotides at positions 1307-1309 are ATC or positions 1307-1309 are deleted, the nucleotide at position 1841 is A or C, at position 1852 is G or A, at position 2075 is G or A, at position 6063 is G or T, at position 6173 is A or C, at position 6194 is G or A, at position 7820 is C or G, at position 25283 is G or C, the nucleotides at positions 28453-28465 are -TCCGCGAGAGGGC- or positions 28453-28465 are deleted, the nucleotide at position 28543 is C or T, at position 28746 is A or C, at position 29904 is G or A, at position 37861 is C or T, at position 39834 is T or A, and at position 40018 is C or T.

[0037] In a further embodiment, the one or more polymorphic regions of the LIPA gene is a haplotype comprising particular allelic variants at nucleotides 1852, 6063 and 7820 of SEQ ID NO: 468. In this embodiment, the nucleotide in LIPA at position 1852 of SEQ ID NO: 468 is A, at position 6063 of SEQ ID NO: 468 is G, and at position 7820 of SEQ ID NO: 468 is C.

[0038] For each of the methods provided herein, polymorphic regions for the TNFRSF6 gene include, but are not limited to, nucleotide positions 1530, 1550, 14525, 14714, 18982, 19069, 20412, 20552, 23199, 23416, 24890, 26359, 199, 213, 843, 2967, 3103, 5335, 5345, 6074, 9374, 9907, 9936, 10937, 11200, 11279, 11359, 11503, 11511, 11587, 11694, 11905, 12193, 12208, 12238, 18511, 18567, 20640, 21585, 22439, 25081, 26878, 27670, 1926, 2269, 18934, 19227 and 22026 of SEQ ID NO: 403, or the complements thereof. In particular embodiments, the nucleotide(s): at position 1530 is T or C, at position 1550 is A or G, at position 14525 is G or A, at position 14714 is C or T, at position 18982 is G or C, at position 19069 is A or G, at position 20412 is A or G, at position 20552 is A or G, at position 23199 is G or A, at position 23416 is T or C, at position 24890 is A or G, at position 26359 is A or T, at position 1926 is G or A, at position 2269 is G or A, at position 18934 is C or T, at position 19227 is C or T, and at position 22026 is C or G.

[0039] For each of the methods provided herein, polymorphic regions for the uPA (PLAU) gene include, but are not limited to nucleotide positions selected from the group of uPA nucleotide positions of SEQ ID NO: 559 or 560 consisting of 9, 401, 464, 515, 748, 1229, 1356, 1752, 1942, 2127, 2543, 3029, 3169, 3799, 3947, 4808, 5287, 6532, 178, 1363, 1423, 1465, 1540, 2297, 2445, 2653, 3080, 3546, 3664, 3816, 4320, 4369, 4399, 4851, 5186, 5204, 5787, 6519, 6909, 7235, 7848, 7908, and the complementary positions thereof; and positions of SEQ ID NO: 563 consisting of 79, 93, 256, 385 and 714, and the complementary positions thereof. In particular embodiments, the nucleotide(s) in SEQ ID NO: 559 or 560: at position 9 is A or C, at position 401 is G or A, at position 464 is G or position 464 is deleted, at position 515 is C or T, at position 748 is G or T, at position 1229 is T or G, at position 1356 is C or T, at position 1752 is T or C, at position 1942 is G or A, at position 2127 is G or A, at position 2543 is G or A, at position 3029 is G or A, at position 3169 is C or T, at position 3799 is T or C, at position 3947 is C or T, at position 4808 is C or T, at position 5287 is T or C, and at position 6532 is T or C, and the complements thereof; and the nucleotide in SEQ ID NO: 563: at position 79 is T or C, at position 93 is a C or position 93 is deleted, at position 256 is G or T, at position 385 is C or T, at position 714-715 is the dinulceotide -GT- or the -GT- dinucleotide is deleted.

[0040] In particular embodiments of the methods provided herein the one or more uPA polymorphisms occur at nucleotide positions corresponding to nucleotide positions selected from the group of nucleotide positions of SEQ ID NO: 569 or 560 consisting of 401, 515, 748 and 1752 and the complementary positions thereof; and of SEQ ID NO: 563 consisting of 93 and 714-715, and the complementary positions thereof. In other embodiments, the one or more uPA polymorphisms occur at nucleotide positions corresponding to nucleotide positions selected from the group of nucleotide positions of SEQ ID NO: 559 or 560 consisting of 9, 401, 464, 515, 748, 1229, 1356, 1752, 1942, 2127, 2543, 3029, 3169, 3799, 3947, 4808, 5287, and 6532 and the complementary positions thereof; and positions of SEQ ID NO: 563 consisting of 79, 93, 256, 385 and 714, and the complementary positions thereof. In yet other embodiments, the one or more uPA polymorphisms occur at nucleotide positions corresponding to nucleotide positions selected from the group of nucleotide positions of SEQ ID NO: 559 or 560 52 consisting of 401, 464, 515, 748, 1229, 1356, 1752, 1942, 2127, 2543, 3029 and 5287 and the complementary positions thereof; and positions of SEQ ID NO: 563 consisting of 79, 93, 256, 385 and 714, and the complementary positions thereof. In another embodiment, the one or more uPA polymorphisms occur at nucleotide positions corresponding to nucleotide positions selected from the group of nucleotide positions of SEQ ID NO: 559 or 560 consisting of 9, 178, 401, 464, 515, 748; and positions of SEQ ID NO: 563 consisting of 79, 93, 256, 385 and 714; and the complementary positions thereof. In yet other embodiments, the one or more uPA polymorphisms occur at nucleotide positions corresponding to nucleotide positions selected from the group of nucleotide positions of SEQ ID NO: 559 or 560 consisting of 401, 515 and 748; and positions of SEQ ID NO: 563 consisting of 93 and 714; and the complementary positions thereof. In another embodiment, the uPA polymorphisms occur at nucleotide positions corresponding to nucleotide positions 3169, 3947 and 6532 of SEQ ID NO: 559 or 560 and the complementary positions thereof.

[0041] Further provided are methods for determining a predisposition for or the occurrence of a neurodegenerative disease, such as Alzheimer's disease, comprising detecting the presence or absence of an allelic variant of at least one polymorphic region of at least two different genes associated with neurodegenerative disease, wherein the presence of the allelic variants of two or more genes is indicative of a predisposition for or occurrence of neurodegenerative disease. In a particular embodiment, the method involves detecting the presence or absence of an allelic variant of at least one polymorphic region of one or more of a uPA, SNCG, IDE, LIPA, TNFRSF6 or KNSL1 gene, and at least one polymorphic region of a gene associated with Alzheimer's disease that is different from uPA, SNCG, IDE, LIPA, TNFRSF6 and KNSL1, wherein the presence of the two or more allelic variants is indicative of a predisposition for or the occurrence of Alzheimer's disease. Other or different genes associated with Alzheimer's disease include, but are not limited to, APOE4, and the like.

[0042] The detection of the presence or absence of an allelic variant includes, but is not limited to, methods such as sequencing, allele specific hybridization, primer specific extension, oligonucleotide ligation assay, restriction enzyme site analysis, size analysis, 5′ nuclease digestion and single-stranded conformation polymorphism analysis.

[0043] Nucleic Acid Molecules

[0044] Further provided are isolated nucleic acid molecules encoding the novel polymorphisms of uPA, SNCG, IDE, LIPA, TNFRSF6 and KNSL1 genes. The isolated nucleic acid molecules include the following.

[0045] An isolated nucleic acid molecule, comprising at least 14, 16, 18, 20, 22, 24, 26, 28 and 30 contiguous of a SNCG allele; wherein the contiguous nucleotides include a sequence of 5 contiguous nucleotides of SEQ ID NO: 72 selected from the group of nucleotide positions corresponding to one or more of: position 613 to position 621, except that the nucleotide at position 617 is replaced with a nucleotide selected from the group consisting of G, T and A; position 641 to position 649, except that the nucleotide at position 645 is replaced with a nucleotide selected from the group consisting of C, T and A; position 911 to position 919, except that the nucleotide at position 915 is replaced with a nucleotide selected from the group consisting of G, C and A; position 983 to position 991, except that the nucleotide at position 987 is replaced with a nucleotide selected from the group consisting of G, T and A; position 1946 to position 1954, except that the nucleotide at position 1950 is replaced with a nucleotide selected from the group consisting of C, T and A; position 3147 to position 3155, except that the nucleotide at position 3151 is replaced with a nucleotide selected from the group consisting of G, C and T; position 3174 to position 3182, except that the nucleotide at position 3178 is replaced with a nucleotide selected from the group consisting of G, C and A; position 3185 to position 3193, except that the nucleotide at position 3189 is replaced with a nucleotide selected from the group consisting of G, C and A; position 3280 to position 3288, except that the nucleotide at position 3284 is replaced with a nucleotide selected from the group consisting of T, C and A; position 3775 to position 3783, except that the nucleotide at position 3779 is replaced with a nucleotide selected from the group consisting of G, C and A; position 4152 to position 4160, except that between nucleotides at positions 4155 and 4156 a G is inserted; position 4272 to position 4280, except that the nucleotide at position 4276 is replaced with a nucleotide selected from the group consisting of G, C and A; position 4307 to position 4315, except that the nucleotide at position 4311 is replaced with a nucleotide selected from the group consisting of G, T and A; position 4548 to position 4556, except that the nucleotide at position 4552 is replaced with a nucleotide selected from the group consisting of G, C and A; position 4972 to position 4980, except that the C nucleotide at position 4976 is deleted; position 4991 to position 4999, except that the nucleotide at position 4995 is replaced with a nucleotide selected from the group consisting of G, T and A; position 5021 to position 5029, except that the nucleotide at position 5025 is replaced with a nucleotide selected from the group consisting of G, T and A; position 5132 to position 3140, except that the nucleotide at position 5136 is replaced with a nucleotide selected from the group consisting of G, C and A; position 5513 to 5521, except that the nucleotide at position 5517 is replaced with a nucleotide from the group consisting of G, C and A; position 2529 to position 2537, except that the nucleotide at position 2533 is replaced with a nucleotide selected from the group consisting of G, C and A; position 3367 to position 3375, except that the nucleotide at position 3371 is replaced with a nucleotide selected from the group consisting of G, C and T; position 4623 to position 4631, except that the nucleotide at position 4627 is replaced with a nucleotide selected from the group consisting of G, C and A; position 4723 to position 4731, except that the nucleotide at position 4727 is replaced with a nucleotide selected from the group consisting of G, T and C; position 4809 to position 4817, except that the nucleotide at position 4813 is replaced with a nucleotide selected from the group consisting of G, C and T; and position 5196 to position 5204, except that the nucleotide at position 5200 is replaced with a nucleotide from the group consisting of T, C and A.

[0046] An isolated nucleic acid molecule, comprising at least 14, 16, 18, 20, 22, 24, 26, 28 and 30 contiguous of an IDE allele; wherein the contiguous nucleotides comprise a sequence of 5 contiguous nucleotides of SEQ ID NO: 186, or the complement thereof, selected from the group of nucleotide ranges consisting of one or more of: position 2452 to position 2460, except that the nucleotide at position 2456 is replaced with a nucleotide selected from the group consisting of C, G and A; position 3275 to position 3283, except that the nucleotide at position 3279 is replaced with a nucleotide selected from the group consisting of C, G and A; position 3403 to position 3411, except that the nucleotide at position 3407 is replaced with a nucleotide selected from the group consisting of T, G and A; position 42939 to position 42947, except that the nucleotide at position 42943 is replaced with a nucleotide selected from the group consisting of C, G and A; position 62494 to position 62502, except that the nucleotide at position 62498 is replaced with a nucleotide selected from the group consisting of C, G and A; position 69582 to position 69590, except that the nucleotide at position 69586 is replaced with a nucleotide selected from the group consisting of G, C and A; position 107391 to position 107399, except that the nucleotide at position 107395 is replaced with a nucleotide selected from the group consisting of T, C and A; and position 112110 to position 112118, except that the nucleotide at position 112114 is replaced with a nucleotide selected from the group consisting of C, T and A; and/or a sequence of 5 contiguous nucleotides complementary to SEQ ID NO: 484 selected from the group of nucleotide ranges consisting of one or more of:

[0047] position 816 to position 824, except that the complementary nucleotide at position 820 is replaced with a nucleotide selected from the group consisting of C, G and T;

[0048] position 7062 to position 7070, except that the complementary nucleotide at position 7066 is replaced with a nucleotide selected from the group consisting of T, C and G;

[0049] position 21266 to position 21274, except that the complementary nucleotide at position 21270 is replaced with a nucleotide selected from the group consisting of A, C and G;

[0050] position 22221 to position 22229, except that the complementary nucleotide at position 22225 is replaced with a nucleotide selected from the group consisting of C, G and T;

[0051] position 29290 to position 29298, except that the complementary nucleotide at position 29294 is replaced with a nucleotide selected from the group consisting of A, G and T;

[0052] position 33448 to position 33456, except that the complementary nucleotide at position 33452 is replaced with a nucleotide selected from the group consisting of A, C and G;

[0053] position 33703 to position 33712, except that the complementary nucleotide at position 33708 is replaced with a nucleotide selected from the group consisting of A, C and T;

[0054] position 36978 to position 36986, except that the complementary nucleotide at position 36982 is replaced with a nucleotide selected from the group consisting of A, G, and T;

[0055] position 77782 to position 77790, except that the complementary nucleotide at position 77786 is replaced with a nucleotide selected from the group consisting of A, G and T;

[0056] position 80590 to position 80598, except that the complementary nucleotide at position 80594 is replaced with a nucleotide selected from the group consisting of A, C and T;

[0057] position 84993 to position 85001, except that the complementary nucleotide at position 84997 is replaced with a nucleotide selected from the group consisting of A, C, and G;

[0058] position 86678 to position 86686, except that the complementary nucleotide at position 86682 is replaced with a nucleotide selected from the group consisting of A, G and T;

[0059] position 86853 to position 86861, except that the complementary nucleotide at position 86857 is replaced with a nucleotide selected from the group consisting of A, C and G;

[0060] position 88507 to position 88515, except that the complementary nucleotide at position 88511 is replaced with a nucleotide selected from the group consisting of C, G and T;

[0061] position 90433 to position 90441, except that the complementary nucleotide at position 90437 is replaced with a nucleotide selected from the group consisting of A, C and T;

[0062] position 90581 to position 90597, except that the complementary nucleotide at position 90593 is replaced with a nucleotide selected from the group consisting of A, C and T;

[0063] position 91546 to position 91654, except that the complementary nucleotide at position 91650 is replaced with a nucleotide selected from the group consisting of A, C and G;

[0064] position 91864 to position 91874, except that the complementary nucleotide at position 91870 is replaced with a nucleotide selected from the group consisting of C, G and T;

[0065] position 91874 to position 91882, except that the complementary nucleotide at position 91878 is replaced with a nucleotide selected from the group consisting of A, C and T;

[0066] position 92007 to position 92015, except that the complementary nucleotide at position 92011 is replaced with a nucleotide selected from the group consisting of A, G and T;

[0067] position 93614 to position 93622, except that the complementary nucleotide at position 93618 is replaced with a nucleotide selected from the group consisting of A, C and G;

[0068] position 94340 to position 94348, except that the complementary nucleotide at position 94344 is replaced with a nucleotide selected from the group consisting of A, C and G;

[0069] position 94710 to position 94718, except that the complementary nucleotide at position 94714 is replaced with a nucleotide selected from the group consisting of C, G and T;

[0070] position 95667 to position 95675, except that the complementary nucleotide at position 95671 is replaced with a nucleotide selected from the group consisting of A, C and G;

[0071] position 96320 to position 96328, except that the complementary nucleotide at position 96324 is replaced with a nucleotide selected from the group consisting of A, G and T;

[0072] position 97298 to position 97306, except that the complementary nucleotide at position 97302 is replaced with a nucleotide selected from the group consisting of A, C and T;

[0073] position 37366 to position 97374, except that the complementary nucleotide at position 97370 is replaced with a nucleotide selected from the group consisting of A, C and T;

[0074] position 98249 to position 98257, except that the complementary nucleotide at position 98253 is replaced with a nucleotide selected from the group consisting of A, C and G;

[0075] position 98381 to position 98389, except that the complementary nucleotide at position 98385 is replaced with a nucleotide selected from the group consisting of C, G and T;

[0076] position 98641 to position 98650, except that the complementary nucleotide at position 98646 is replaced with a nucleotide selected from the group consisting of C, G and T;

[0077] position 98810 to position 98818, except that the complementary nucleotide at position 98814 is replaced with a nucleotide selected from the group consisting of A, C and T;

[0078] position 99593 to position 99601, except that the complementary nucleotide at position 99597 is replaced with a nucleotide selected from the group consisting of A, C and G;

[0079] position 100374 to position 100382, except that the complementary nucleotide at position 100378 is replaced with a nucleotide selected from the group consisting of A, C and G;

[0080] position 101025 to position 101033, except that the complementary nucleotide at position 101029 is replaced with a nucleotide selected from the group consisting of C, G and T;

[0081] position 101261 to position 101269, except that the complementary nucleotide at position 101265 is replaced with a nucleotide selected from the group consisting of A, C and G;

[0082] position 102461 to position 102469, except that the complementary nucleotide at position 102465 is replaced with a nucleotide selected from the group consisting of A, G and T;

[0083] position 103285 to position 103293, except that the complementary nucleotide at position 103289 is replaced with a nucleotide selected from the group consisting of A, C and T;

[0084] position 103963 to position 103971, except that the complementary nucleotide at position 103967 is replaced with a nucleotide selected from the group consisting of A, G and T;

[0085] position 105789 to position 105797, except that the complementary nucleotide at position 105793 is replaced with a nucleotide selected from the group consisting of C, G and T;

[0086] position 106072 to position 106080, except that the complementary nucleotide at position 106076 is replaced with a nucleotide selected from the group consisting of A, C and T;

[0087] position 106991 to position 106999, except that the complementary nucleotide at position 106995 is replaced with a nucleotide selected from the group consisting of A, C and T;

[0088] position 107847 to position 107855, except that the complementary nucleotide at position 107851 is replaced with a nucleotide selected from the group consisting of A, G and T;

[0089] position 108430 to position 108438, except that the complementary nucleotide at position 108434 is replaced with a nucleotide selected from the group consisting of A, C and T;

[0090] position 109092 to position 109100, except that the complementary nucleotide at position 109096 is replaced with a nucleotide selected from the group consisting of A, G and T;

[0091] position 109395 to position 1093403, except that the complementary nucleotide at position 109399 is replaced with a nucleotide selected from the group consisting of A, G and T;

[0092] position 109479 to position 109487, except that the complementary nucleotide at position 109483 is replaced with a nucleotide selected from the group consisting of A, C And T;

[0093] position 110866 to position 110874, except that the complementary nucleotide at position 110870 is replaced with a nucleotide selected from the group consisting of A, C and T;

[0094] position 111185 to position 111193, except that the complementary nucleotide at position 111189 is replaced with a nucleotide selected from the group consisting of C, G and T;

[0095] position 111968 to position 111976, except that the complementary nucleotide at position 111972 is replaced with a nucleotide selected from the group consisting of A, C and T;

[0096] position 112623 to position 112631, except that the complementary nucleotide at position 112627 is replaced with a nucleotide selected from the group consisting of C, G and T;

[0097] position 113403 to position 113411, except that the complementary nucleotide at position 113407 is replaced with a nucleotide selected from the group consisting of A, C and T;

[0098] position 114478 to position 114486, except that the complementary nucleotide at position 114482 is replaced with a nucleotide selected from the group consisting of A, C and T;

[0099] position 115469 to position 115477, except that the complementary nucleotide at position 115473 is deleted;

[0100] position 116677 to position 116685, except that the complementary nucleotide at position 116681 is replaced with a nucleotide selected from the group consisting of A, C and G;

[0101] position 117222 to position 117230, except that the complementary nucleotide at position 117226 is replaced with a nucleotide selected from the group consisting of C, G and T;

[0102] position 117596 to position 117604, except that the complementary nucleotide at position 117600 is replaced with a nucleotide selected from the group consisting of T, C and G;

[0103] position 118219 to position 118227, except that the complementary nucleotide at position 118223 is replaced with a nucleotide selected from the group consisting of T, A and G;

[0104] position 120007 to position 120015, except that the complementary nucleotide at position 120011 is replaced with a nucleotide selected from the group consisting of A, G and T;

[0105] position 122256 to position 122264, except that the complementary nucleotide at position 122260 is replaced with a nucleotide selected from the group consisting of A, C and G;

[0106] position 123161 to position 123169, except that the complementary nucleotide at position 123165 is replaced with a nucleotide selected from the group consisting of A, C and G;

[0107] position 123420 to position 123428, except that the complementary nucleotide at position 123424 is replaced with a nucleotide selected from the group consisting of A, G and T;

[0108] position 124348 to position 124356, except that the complementary nucleotide at position 124352 is replaced with a nucleotide selected from the group consisting of A, C and T;

[0109] position 124497 to position 124505, except that the complementary nucleotide at position 124501 is replaced with a nucleotide selected from the group consisting of A, C and T;

[0110] position 124688 to position 124696, except that the complementary nucleotide at position 124692 is replaced with a nucleotide selected from the group consisting of A, C and G;

[0111] position 125109 to position 125117, except that the complementary nucleotide at position 125113 is replaced with a nucleotide selected from the group consisting of C, G and T;

[0112] position 125154 to position 125163, except that the complementary nucleotide at position 125159 is replaced with a nucleotide selected from the group consisting of A, G and T;

[0113] position 126564 to position 126572, except that the complementary nucleotide at position 126568 is replaced with a nucleotide selected from the group consisting of A, G and T;

[0114] position 127162 to position 127170, except that the complementary nucleotide at position 127166 is replaced with a nucleotide selected from the group consisting of A, C and T;

[0115] position 127594 to position 127602, except that the complementary nucleotide at position 127598 is replaced with a nucleotide selected from the group consisting of C, G and T;

[0116] position 127596 to position 127604, except that the complementary nucleotide at position 127600 is replaced with a nucleotide selected from the group consisting of C, G and T;

[0117] position 127605 to position 127613, except that the complementary nucleotide at position 127609 is replaced with a nucleotide selected from the group consisting of C, G and T;

[0118] position 127610 to position 127618, except that the complementary nucleotide at position 127614 is replaced with a nucleotide selected from the group consisting of C, G and T;

[0119] position 127619 to position 127627, except that the complementary nucleotide at position 127623 is replaced with a nucleotide selected from the group consisting of C, G and T;

[0120] position 127658 to position 127666, except that the complementary nucleotide at position 127662 is replaced with a nucleotide selected from the group consisting of A, C and G;

[0121] position 128049 to position 128057, except that the complementary nucleotide at position 128053 is replaced with a nucleotide selected from the group consisting of A, C and T;

[0122] position 128257 to position 128296, except that at complementary nucleotide positions 128261-128292, 1 or 2 -TAAA- repeats are deleted;

[0123] position 128285 to position 128293, except that the complementary nucleotide at position 128289 is replaced with a nucleotide selected from the group consisting of A, C and G;

[0124] position 128287 to position 128295, except that the complementary nucleotide at position 128291 is replaced with a nucleotide selected from the group consisting of C, G and T;

[0125] position 128389 to position 128397, except that the complementary nucleotide at position 128393 is replaced with a nucleotide selected from the group consisting of C, G and T; and

[0126] position 129440 to position 129448, except that the complementary nucleotide at position 129444 is replaced with a nucleotide selected from the group consisting of C, G and T.

[0127] An isolated nucleic acid molecule, comprising at least 14, 16, 18, 20, 22, 24, 26, 28 and 30 contiguous of a KNSL1 allele; wherein the contiguous nucleotides include a sequence of 5 contiguous nucleotides of SEQ ID NO: 347 selected from the group of nucleotide positions corresponding to one or more of: position 295 to position 303, except that between nucleotides 299 and 300 a dinucleotide corresponding to -CA- is inserted; position 1148 to position 1156, except that the nucleotide at position 1152 is replaced with a nucleotide selected from the group consisting of A, C and T; position 14230 to position 14238, except that between nucleotides 14234 and 14235, a nucleotide selected from the group consisting of T, C, G and A is inserted; position 15100 to position 15108, except that the nucleotide at position 15104 is replaced with a nucleotide selected from the group consisting of T, C and G; position 20811 to position 20819, except that the nucleotide at position 20815 is replaced with a nucleotide selected from the group consisting of C, G and A; position 36734 to position 36742, except that the nucleotides at positions 36738 and 36739 are replaced with nucleotides corresponding to -AC-, respectively; position 41010 to position 41018, except that between nucleotides at positions 41014 and 41015, a nucleotide sequence corresponding to -AATTT- is inserted; position 42121 to position 42129, except that the nucleotide at position 42125 is replaced with a nucleotide selected from the group consisting of C, G and A; position 56702 to position 56710, except that the nucleotide at position 56706 is replaced with a nucleotide selected from the group consisting of G, T and A; position 56883 to position 56891, except that the nucleotide at position 56887 is replaced with a nucleotide selected from the group consisting of C, T and G; position 58520 to position 58528, except that the nucleotide at position 58524 is replaced with a nucleotide selected from the group consisting of G, T and A; and/or a sequence of 5 contiguous nucleotides of SEQ ID NO: 484 selected from the group of nucleotide ranges consisting of one or more of:

[0128] position 130872 to position 130880, except that the nucleotide at position 130876 is replaced with a nucleotide selected from the group consisting of A, G and T;

[0129] position 131374 to position 131382, except that the nucleotide at position 131378 is replaced with a nucleotide selected from the group consisting of C, G and T;

[0130] position 131612 to position 131620, except that the nucleotide at position 131616 is replaced with a nucleotide selected from the group consisting of C, G and T;

[0131] position 131616 to position 131624, except that the nucleotide at position 131620 is replaced with a nucleotide selected from the group consisting of C, G and T;

[0132] position 131684 to position 131692, except that the nucleotide at position 131688 is replaced with a nucleotide selected from the group consisting of A, C and G;

[0133] position 131994 to position 132007, except that the nucleotides at positions 131998-132003 are deleted;

[0134] position 1 32000 to position 132036, except that the 29 base pair poly-T repeat at nucleotide positions 132004-132032 is replaced with either a 9, 16, 21 or 26 base pair poly-T repeat;

[0135] position 132693 to position 132701, except that the nucleotide at position 132697 is replaced with a nucleotide selected from the group consisting of C, G and T;

[0136] position 132964 to position 132972, except that the nucleotide at position 132968 is replaced with a nucleotide selected from the group consisting of A, G and T;

[0137] position 133351 to position 133359, except that between nucleotides at positions 133354-133355 is either a 6, 7, or 8 base pair poly-T insertion;

[0138] position 133802 to position 133810, except that the nucleotide at position 133806 is replaced with a nucleotide selected from the group consisting of A, C and G;

[0139] position 134026 to position 134034, except that the nucleotide at position 134030 is replaced with a nucleotide selected from the group consisting of A, C and T;

[0140] position 134287 to position 134295, except that the nucleotide at position 134291 is replaced with a nucleotide selected from the group consisting of A, C and T;

[0141] position 134657 to position 134665, except that the nucleotide at position 134661 is replaced with a nucleotide selected from the group consisting of A, C and T;

[0142] position 137083 to position 137091, except that the nucleotide at position 137087 is replaced with a nucleotide selected from the group consisting of C, G and T;

[0143] position 137138 to position 137146, except that the nucleotide at position 137142 is replaced with a nucleotide selected from the group consisting of A, C and T;

[0144] position 138392 to position 138370, except that the nucleotide at position 138396 is replaced with a nucleotide selected from the group consisting of A, G and T;

[0145] position 140661 to position 140669, except that the nucleotide at position 140665 is replaced with a nucleotide selected from the group consisting of A, C and G;

[0146] position 140732 to position 140740, except that the nucleotide at position 140736 is replaced with a nucleotide selected from the group consisting of C, G and T;

[0147] position 141169 to position 141177, except that the nucleotide at position 141173 is replaced with a nucleotide selected from the group consisting of C, G and T;

[0148] position 142052 to position 142070, except that the nucleotide at position 142056 is replaced with a nucleotide selected from the group consisting of A, C and G;

[0149] position 142773 to position 142781, except that between nucleotides at positions 142776-142777 is an -AG- insertion;

[0150] position 143021 to position 143029, except that the nucleotide at position 143025 is replaced with a nucleotide selected from the group consisting of A, C and G;

[0151] position 143725 to position 143733, except that the nucleotide at position 143729 is replaced with a nucleotide selected from the group consisting of A, G and T;

[0152] position 144480 to position 144488, except that the nucleotide at position 144484 is replaced with a nucleotide selected from the group consisting of C, G and T;

[0153] position 146177 to position 146185, except that the nucleotide at position 146181 is replaced with a nucleotide selected from the group consisting of A, C and G;

[0154] position 147047 to position 147055, except that the nucleotide at position 147051 is replaced with a nucleotide selected from the group consisting of A, C and T;

[0155] position 147318 to position 147326, except that the nucleotide at position 147322 is replaced with a nucleotide selected from the group consisting of A, G and T;

[0156] position 147703 to position 147711, except that the nucleotide at position 147707 is replaced with a nucleotide selected from the group consisting of A, C and T;

[0157] position 147838 to position 147849, except that the nucleotides at positions 147842-147845 are deleted;

[0158] position 148076 to position 148084, except that the nucleotide at position 148080 is replaced with a nucleotide selected from the group consisting of A, G and T;

[0159] position 149022 to position 149047, except that the 18 nucleotide -AC- repeat at positions 149026-149043 is replaced with either a 17, 19 or 22 base pair -AC- repeat;

[0160] position 149040 to position 149048, except that the 30 nucleotide -GT- repeat at positions 149044-149073 is replaced with either a 22, 24, 28 or 32 base pair -GT- repeat;

[0161] position 149385 to position 149393, except that the nucleotide at position 149389 is replaced with a nucleotide selected from the group consisting of A, C and T;

[0162] position 149999 to position 150007, except that the nucleotide at position 150003 is replaced with a nucleotide selected from the group consisting of A, C and T;

[0163] position 150380 to position 150388, except that the nucleotide at position 150384 is replaced with a nucleotide selected from the group consisting of A, C and T;

[0164] position 150450 to position 150458, except that the nucleotide at position 150454 is replaced with a nucleotide selected from the group consisting of A, G and T;

[0165] position 150682 to position 150690, except that the nucleotide at position 150686 is replaced with a nucleotide selected from the group consisting of A, C and T;

[0166] position 151339 to position 151347, except that the nucleotide at position 151343 is replaced with a nucleotide selected from the group consisting of A, G and T;

[0167] position 151957 to position 151965, except that the nucleotide at position 151961 is replaced with a nucleotide selected from the group consisting of A, G and T;

[0168] position 152115 to position 152123, except that the nucleotide at position 152119 is replaced with a nucleotide selected from the group consisting of A, G and T;

[0169] position 153787 to position 153795, except that the nucleotide at position 153791 is replaced with a nucleotide selected from the group consisting of A, G and T;

[0170] position 154324 to position 154332, except that the nucleotide at position 154328 is replaced with a nucleotide selected from the group consisting of C, G and T;

[0171] position 154509 to position 154517, except that the nucleotide at position 154513 is replaced with a nucleotide selected from the group consisting of A, G and T;

[0172] position 154635 to position 154643, except that the nucleotide at position 154639 is replaced with a nucleotide selected from the group consisting of A, C and T;

[0173] position 155045 to position 155053, except that the nucleotide at position 155049 is replaced with a nucleotide selected from the group consisting of A, C and G;

[0174] position 155110 to position 155118, except that the nucleotide at position 155114 is replaced with a nucleotide selected from the group consisting of A, C and G;

[0175] position 158036 to position 158044, except that the nucleotide at position 158040 is replaced with a nucleotide selected from the group consisting of A, G and T;

[0176] position 158891 to position 158899, except that the nucleotide at position 158895 is replaced with a nucleotide selected from the group consisting of A, C and T;

[0177] position 191280 to position 191288, except that the nucleotide at position 191284 is replaced with a nucleotide selected from the group consisting of A, G and T;

[0178] position 192268 to position 192276, except that the nucleotide at position 192272 is replaced with a nucleotide selected from the group consisting of A, G and T;

[0179] position 192694 to position 192702, except that the nucleotide at position 192698 is replaced with a nucleotide selected from the group consisting of C, G and T; and

[0180] position 193702 to position 193710, except that the nucleotide at position 193706 is replaced with a nucleotide selected from the group consisting of A, C and G.

[0181] An isolated nucleic acid molecule, comprising at least 14, 16, 18, 20, 22, 24, 26, 28 and 30 contiguous of a LIPA allele; wherein the contiguous nucleotides include a sequence of 5 contiguous nucleotides of SEQ ID NO: 467 selected from the group of nucleotide positions corresponding to one or more of: position 1193 to position 1201, except that the nucleotide at position 1197 is replaced with a nucleotide selected from the group consisting of T, G and A; position 1303 to position 1313, except that the nucleotides at positions 1307-1309 are deleted; position 6059 to position 6067, except that the nucleotide at position 6063 is replaced with a nucleotide selected from the group consisting of T, C and A; position 7816 to position 7824, except that the nucleotide at position 7820 is replaced with a nucleotide selected from the group consisting of T, G and A; position 28449 to position 28469, except that the nucleotides at positions 28453-28465 are deleted; position 28539 to position 28547, except that the nucleotide at position 28543 is replaced with a nucleotide selected from the group consisting of G, T and A;

[0182] position 28742 to position 28750, except that the nucleotide at position 28746 is replaced with a nucleotide selected from the group consisting of C, T and G. In a particular embodiment, at least 16 contiguous nucleotides of a LIPA allele are contained in SEQ ID NO: 467.

[0183] An isolated nucleic acid molecule, comprising at least 14, 16, 18, 20, 22, 24, 26, 28 and 30 contiguous of a TNFRSF6 allele; wherein the contiguous nucleotides include a sequence of 5 contiguous nucleotides of SEQ ID NO: 402 selected from the group of nucleotide positions corresponding to one or more of: position 1526 to position 1534, except that the nucleotide at position 1530 is replaced with a nucleotide selected from the group consisting of C, G and A; position 14521 to position 14529, except that the nucleotide at position 14525 is replaced with a nucleotide selected from the group consisting of C, T and A; position 14710 to position 14718, except that the nucleotide at position 14714 is replaced with a nucteotide selected from the group consisting of T, G and A; position 19065 to position 19073, except that the nucleotide at position 19069 is replaced with a nucleotide selected from the group consisting of G, C and T; position 20408 to position 20416, except that the nucleotide at position 20412 is replaced with a nucleotide selected from the group consisting of C, T and G; position 20548 to position 20556, except that the nucleotide at position 20552 is replaced with a nucleotide selected from the group consisting of T, G and C; position 23195 to position 23203, except that the nucleotide at position 23199 is replaced with a nucleotide selected from the group consisting of C, T and A; position 23412 to position 23420, except that the nucleotide at position 23416 is replaced with a nucleotide selected from the group consisting of C, A and G, position 1922 to position 1930, except that the nucleotide at position 1926 is replaced with a nucleotide selected from the group consisting of C, T and A; and position 2265 to position 2273, except that the nucleotide at position 2269 is replaced with a nucleotide selected from the group consisting of C, A and T. In a particular embodiment the at least 14, 16, 18, 20, 22, 24, 26, 28 and 30 contiguous of a TNFRSF6 allele are contained in SEQ ID NO: 402.

[0184] An isolated nucleic acid molecule, comprising at least 16, 18, 20, 22, 24, 26, 28 or at least 30 contiguous nucleotides of a uPA gene; wherein the contiguous nucleotides include a sequence of 5 contiguous nucleotides of SEQ ID NO: 559 or 560, or the complement thereof, selected from the group of nucleotide sequences of SEQ ID NO: 559 or 560 consisting of:

[0185] position 397 to position 405, wherein the nucleotide at position 401 is selected from the group consisting of A, T and C; position 511 to position 519, wherein the nucleotide at position 515 is selected from the group consisting of T, G and A; position 744 to position 752, wherein the nucleotide at position 748 is selected from the group consisting of T, C and A; and position 1748 to position 1756, wherein the nucleotide at position 1752 is selected from the group consisting of C, G and A; or of SEQ ID NO: 563 consisting of:

[0186] position 89 to position 97, wherein the C nucleotide at position 93 is deleted; and position 710 to position 719, wherein the nucleotides at positions 714-715 are deleted.

[0187] Also provided are isolated nucleic acid molecules of the above-described alleles comprising at least 20, 30 40, 50, 60, 70, 80, 90 or 100 contiguous nucleotides of a uPA, SNCG, IDE, LIPA, TNFRSF6 or KNSL1 allele.

[0188] Further provided are nucleic acid vectors comprising the nucleic acid molecules, including cDNAs, described herein and cells containing these nucleic acid vectors.

[0189] Primers, Probes and Antisense Nucleic Acid

[0190] Further provided are primers, probes and antisense nucleic acid molecules capable of specifically hybridizing to uPA, SNCG, IDE, LIPA, TNFRSF6 and KNSL1 genes or cDNA under conditions of moderate or high stringency. Also provided are primer pairs capable of specifically amplifying all, or a portion of, any of the nucleic acid molecules disclosed herein. The primers, probes or antisense molecules can also comprise at least 20, 30, 40, 50, 60, 70, 80, 90 or 100 contiguous nucleotides of a uPA, SNCG, IDE, LIPA, TNFRSF6 or KNSL1 allele, or the complements thereof.

[0191] Exemplary primers, probes or antisense nucleic acid molecules comprise a sequence of nucleotides that specifically hybridizes adjacent to, or at a polymorphic region of: a SNCG allele spanning a nucleotide position of SEQ ID NO: 73, or the complement thereof, selected from the group consisting of nucleotide positions 915, 987, 2533, 3151, 3178, 3189, 3284, 3371, 3779, 4156, 4276, 4311, 4627, 4727, 4813, 5136, 5200 and 5517; an IDE allele spanning a nucleotide position of SEQ ID NO: 187, or the complement thereof, selected from the group consisting of nucleotide positions 2456, 69586, 107395, 112114, and 116662; or and IDE allele spanning a nucleotide position of SEQ ID NO: 484, or the complement thereof, selected from the group consisting of nucleotide positions 820, 7066, 11758, 21270, 22225, 29294, 33452, 33708, 36982, 54862, 77786, 80594, 84792, 84997, 86682, 86857, 88511, 90437, 90593, 91650, 91870, 91878, 92011, 93618, 94344, 94714, 95671, 96324, 97302, 97370, 98253, 98276, 98385, 98646, 98814, 99597, 100378, 101029, 101265, 102465, 103289, 103967, 105793, 106076, 106453, 106600, 106995, 107851, 108434, 109096, 109399, 109483, 110870, 111189, 111972, 112627, 112629, 112631, 113407, 114444, 114482, 115473, 116681, 117226, 117600, 117802, 118223, 120011, 122260, 123165, 123424, 124352, 124501, 124692, 125113, 125159, 126568, 127166, 127598, 127600, 127609, 127614, 127623, 127662, 128053, 128261, 128289, 128291, 128393, and 129444; a KNSL1 allele spanning a nucleotide position of SEQ ID NO: 348, or the complement thereof, selected from the group consisting of nucleotide positions 300, 1152, 14235, 15104, 20815, 36738-36739, 41015, 42125, 56706, 56887 and 58524; or a KNSL1 allele spanning a nucleotide position of SEQ ID NO: 484, or the complement thereof, selected from the group consisting of nucleotide positions 130876, 131378, 131616, 131620, 131688, 131998, 132004, 132697, 132968, 133355, 133806, 134030, 134291, 134661, 137087, 137142, 138396, 140665, 140736, 141173, 142056, 142777, 143025, 143729, 144484, 146181, 147051, 147322, 147707, 147842, 148080, 149026, 149044, 149389, 150003, 150384, 150454, 150686, 151343, 151961, 152119, 153791, 154328, 154513, 154639, 155049, 155114, 158040, 158895, 191284, 192272, 192698, and 193706; a LIPA allele spanning a nucleotide position of SEQ ID NO: 468, or the complement thereof, selected from the group consisting of nucleotide positions 1197, 7820, 28543 and 28746; and/or a TNFRSF6 allele spanning a nucleotide position of SEQ ID NO: 403, or the complement thereof, selected from the group consisting of nucleotide positions 1530, 14525, 14714, 19069, 20412, 20552, 23199, 23416, 1926 and 2269.

[0192] Methods to Predict Drug Response

[0193] The presence or absence of one or more allelic variants of uPA, SNCG, IDE, LIPA, TNFRSF6 and/or KNSL1 may correlate with a subject's response, either positive or negative, to a specific therapeutic drug. One or more allelic variants of these genes are correlated with drug response by obtaining genotype and/or haplotype data from various groups of patients in which the drug has been administered. The genotype or haplotype of the subject can then allow a clinician to take a more individualized approach to preventing the onset or progression of neurodegenerative disease by tailoring the therapy to increase the chance of a favorable effect.

[0194] Also provided are methods for predicting a response, either positive or negative, of a subject to a drug used to treat neurodegenerative disease, such as Alzheimer's disease, or another neurodegenerative disease by detecting, in the subject, the presence or absence of an allelic variant of one or more polymorphic regions of one or more genes selected from the group consisting of uPA, SNCG, IDE, KNSL, LIPA and/or TNFRSF6. A collection of polymorphic regions that individually represent allelic variants that are associated with neurodegenerative disease including Alzheimer's disease may often be more informative than a single allelic variant for indicating whether an individual will positively respond to a given drug for neurodegenerative disease. Each allelic variant may be assayed individually or simultaneously using multiplex assay methods. Thus, the provided methods encompass detection of an allelic variant of more than one polymorphic region of one or more of a uPA, SNCG, IDE, LIPA, TNFRSF6 and/or KNSL1 gene.

[0195] Further provided is a method for predicting a response of a subject to a drug used to treat Alzheimer's disease, comprising detecting the presence or absence of at least one allelic variant of uPA, SNCG, IDE, LIPA, TNFRSF6 or KNSL1; wherein the presence of at least one allelic variant is indicative of a positive response.

[0196] For the above methods of predicting drug response, the allelic variant can be: one or more polymorphic regions of the SNCG gene corresponding to SEQ ID NO: 73 nucleotide positions 560, 590, 617, 645, 915, 987, 1723, 1943, 1950, 3151, 3178, 3189, 3284, 3779, 4156, 4276, 4311, 4552, 4976, 4995, 5019, 5025, 5112, 5136, 5517, 5421, 5648, 2533, 3371, 4627, 4727, 4813 and 5200, or the complement thereof; one or more polymorphic regions of the IDE gene corresponding to SEQ ID NO: 187 nucleotide positions 2456, 3279, 3407, 42943, 62498, 69586, 107395, 112114, 116662, 17095, 17242, 33590, 38903, 43391, 45017, 68906, 68973, 73772, 74084, 83024, 83104, 89301, 105060, 108489, 111914, 113142, 113591, 114683, 117803 and 124565, or the complement thereof; or of SEQ ID NO: 484 nucleotide positions 820, 7066, 11758, 21270, 22225, 29294, 33452, 33708, 36982, 54862, 77786, 80594, 84792, 84997, 86682, 86857, 88511, 90437, 90593, 91650, 91870, 91878, 92011, 93618, 94344, 94714, 95671, 96324, 97302, 97370, 98253, 98276, 98385, 98646, 98814, 99597, 100378, 101029, 101265, 102465, 103289, 103967, 105793, 106076, 106453, 106600, 106995, 107851, 108434, 109096, 109399, 109483, 110870, 111189, 111972, 112627, 112629, 112631, 113407, 114444, 114482, 115473, 116681, 117226, 117600, 117802, 118223, 120011, 122260, 123165, 123424, 124352, 124501, 124692, 125113, 125159, 126568, 127166, 127598, 127600, 127609, 127614, 127623, 127662, 128053, 128261, 128289, 128291, 128393, 129444, 6078, 7106, 11758, 18267, 19581, 30078, 54862, 73841, 83448, 80304, 98276, 117802 and 129124, or the complement thereof; one or more polymorphic regions of the KNSL1 gene corresponding to SEQ ID NO: 348 nucleotide positions 300, 1152, 14235, 15104, 20815, 35719, 36738-36739, 41015, 42125, 45083, 45887, 56706, 56887, 58524, 62661 and 63802, or the complement thereof; or of SEQ ID NO: 484 nucleotide positions 130876, 131378, 131616, 131620, 131688, 131998, 132004, 132370, 132697, 132968, 133355, 133806, 134030, 134291, 134661, 137087, 137142, 138396, 140665, 140736, 141173, 142056, 142777, 143025, 143729, 144484, 146181, 147051, 147322, 147707, 147842, 148080, 149026, 149044, 149389, 150003, 150384, 150454, 150686, 151343, 151961, 152119, 153791, 154328, 154513, 154639, 155049, 155114, 158040, 158895, 191284, 192272, 192698, 193706, 132370, 136968, 139284, 159167, 159403, 178748, 180149 and 180153, or the complement thereof; one or more polymorphic regions of the LIPA gene corresponding to SEQ ID NO: 468 nucleotide positions 1197, 1307-1309, 1841, 1852, 2075, 6063, 6173, 6194, 7820, 25283, 28453-28465, 28543, 28746, 29904, 37861, 39834, 40018, 7219, 8242, 10114, 10606, 10688, 10729, 11559, 12031, 14497, 14729, 21145, 21329, 21404, 21429, 22246, 22354, 22621, 23802 and 25969, or the complement thereof; and one or more polymorphic regions of the TNFRSF6 gene corresponding to SEQ ID NO: 403 nucleotide positions 1530, 1550, 14525, 14714, 18982, 19069, 20412, 20552, 23199, 23416, 24890, 26359, 199, 213, 843, 2967, 3103, 5335, 5345, 6074, 9374, 9907, 9936, 10937, 11200, 11279, 11359, 11503, 11511, 11587, 11694, 11905, 12193, 12208, 12238, 18511, 18567, 20640, 21585, 22439, 25081, 26878, 27670, 1926, 2269, 18934, 19227 and 22026, or the complement thereof.

[0197] In a particular embodiment for the SNCG allele, the nucleotide of SEQ ID NO: 73 at: position 560 is G or A, at position 590 is A or C, at position 617 is C or T, at position 645 is G or A, at position 915 is T or G, at position 987 is C or A, at position 1723 is A or G, at position 1943 is G or C, at position 1950 is G or A, at position 3151 is A or G, at position 3178 is T or C, at position 3189 is T or C, at position 3284 is G or A, at position 3779 is T or position 3779 is deleted, at position 4156 corresponds to a single nucleotide G that is either inserted or not inserted, at position 4276 is T or A, at position 4311 is C or T, at position 4552 is T or A, at position 4976 is C or position 4976 is deleted, at position 4995 is C or G, at position 5019 is C or T, at position 5025 is C or A, at position 5112 is T or A, at position 5136 is T or A, at position 5517 is T or C, at position 2533 is T or G, at position 3371 is A or C, at position 4627 is T or G, at position 4727 is A or G, at position 4813 is A or C, and at position 5200 is G or C.

[0198] In a particular embodiment for the IDE allele, the nucleotide of SEQ ID NO: 187 at position 2456 is T or G, at position 3279 is T or C, at position 3407 is C or T, at position 42943 is T or C, at position 62498 is T or C, at position 69586 is T or C, at position 107395 is G or A, at position 112114 is G or A, and at position 116662 is T or A; or the complementary nucleotide(s) in SEQ ID NO: 484: at position 820 is A or T, at position 7066 is A or G, at position 11758 is T or C, at position 21270 is T or G, at position 22225 is A or T, at position 29294 is C or T, at position 33452 is G or T, at position 33708 is G or A, at position 36982 is C or T, at position 54862 is A or G, at position 77786 is C or A, at position 80594 is G or A, at position 84792 is T or C, at position 84997 is G or T, at position 86682 is C or T, at position 86857 is T or A, at position 88511 is A or G, at position 90437 is G or T, at position 90593 is G or A, at position 91650 is T or C, at position 91870 is G or A, at position 91878 is G or A, at position 92011 is C or T, at position 93618 is T or C, at position 94344 is C or T, at position 94714 is A or G, at position 95671 is A or G, at position 96324 is A or G, at position 97302 is G or A, at position 97370 is G or A, at position 98253 is T or C, at position 98276 is C or T, at position 98385 is A or G, at position 98646 is T or A, at position 98814 is G or A, at position 99597 is C or T, at position 100378 is T or C, at position 101029 is G or A, at position 101265 is C or T, at position 102465 is C or G, at position 103289 is T or G, at position 103967 is C or T, at position 105793 is A or G, at position 106076 is G or T, at position 106453 is C or T, at position 106600 is A or G, at position 106995 is G or A, at position 107851 is C or T, at position 108434 is G or C, at position 109096 is C or T, at position 109399 is C or T, at position 109483 is T or G, at position 110870 is G or A, at position 111189 is A or G, at position 111972 is G or A, at position 112627 is A or T, at position 112629 is A or T, at position 112631 is T or A, at position 113407 is C or G, at position 114444 is C or G, at position 114482 is G or C, at position 115473 is C or position 115473 is deleted, at position 116681 is G or T, at position 117226 is A or T, at position 117600 is A or G, at position 117802 is C or T, at position 118223 is G or C, at position 120011 is C or T, at position 122260 is A or G, at position 123165 is A or G, at position 123424 is G or A, at position 124352 is A or G, at position 124501 is C or T, at position 124692 is A or G, at position 125113 is T or A, at position 125159 is G or A, at position 126568 is G or C, at position 127166 is C or G, at position 127598 is T or C, at position 127600 is T or C, at position 127609 is T or C, at position 127614 is T or C, at position 127623 is T or C, at position 127662 is G or A, at position 128053 is G or A, at position 128261 is a repeat of -TAAA- occurring 6, 7, or 8 times beginning at position 128261, at position 128289 is A or T, at position 128291 is T or G, at position 128393 is T or G, at position 129444 is C or T.

[0199] In a particular embodiment for the KNSL1 allele, the nucleotide of SEQ ID NO: 348 at position 300 corresponds to a dinucleotide -CA- that is either inserted or not inserted beginning at position 300, at position 1152 is G or T, at position 14235 corresponds to a single nucleotide T that is either inserted or not inserted, at position 15104 is A or G, at position 20815 is T or C, at position 35719 is T or C, at positions 36738-36739 is a dinucleotide corresponding to CA or AC, at position 41015 corresponds to the oligonucleotide -AATTT- that is either inserted or not inserted beginning at position 41015, at position 42125 is T or G, at position 45083 is C or T, at position 45887 is G or C, at position 56706 is C or T, at position 56887 is A or G, at position 58524 is C or T, at position 62661 is C or T, and at position 63802 is A or C, or the nucleotide(s) in SEQ ID NO: 484: at position 130876 is T or C, at position 131378 is G or A, at position 131616 is G or A, at position 131620 is G or A, at position 131688 is T or G, at positions 131998-131203 are -CTTTTC- or positions 131998-131203 are deleted, at position 132004 is either a 9, 16, 21, 26, or 29 base pair poly-T repeat beginning at nucleotide 132004, at position 132370 is A or G, at position 132697 is A or G, at position 132968 is C or T, at position 133355 is either a 6, 7 or 8 base pair poly-T repeat beginning at nucleotide 133355, at position 133806 is T or G, at position 134030 is G or A, at position 134291 is A or G, at position 134661 is G or A, at position 137087 is A or G, at position 137142 is G or A, at position 138396 is C or T, at position 140665 is T or G, at position 140736 is A or G, at position 141173 is A or G, at position 142056 is T or C, at position 142777 corresponds to a dinucleotide -AG- that is either inserted or not inserted beginning at position 142777, at position 143025 is G or T, at position 143729 is C or A, at position 144484 is T or A, at position 146181 is T or A, at position 147051 is G or A, at position 147322 is C or T, at position 147707 is G or T, at positions 147842-147845 are -AGTT- or positions 147842-147845 are deleted, at position 148080 is C or T, at position 149026 is either a 17, 18, 19 or 22 base pair -AC- repeat beginning at nucleotide 149026, at position 149044 is either a 22, 24, 28, 30, 32 or 36 base pair -GT- repeat beginning at nucleotide 149044, at position 149389 is A or G, at position 150003 is G or A, at position 150384 is G or T, at position 150454 is C or T, at position 150686 is G or T, at position 151343 is C or T, at position 151961 is C or T, at position 15211 9 is C or T, at position 153791 is C or G, at position 154328 is A or T, at position 154513 is C or A, at position 154639 is G or A, at position 155049 is T or C, at position 155114 is T or C, at position 158040 is C or A, at position 158895 is G or A, at position 191284 is C or T, at position 192272 is C or T, at position 192698 is A or T, at position 193706 is T or A.

[0200] In a further embodiment for the LIPA allele, the nucleotide of SEQ ID NO: 468 at position 1197 is C or G, at positions 1307-1309 are ATC or positions 1307-1309 are deleted, at position 1841 is A or C, at position 1852 is G or A, at position 2075 is G or A, at position 6063 is G or T, at position 6173 is A or C, at position 6194 is G or A, at position 7820 is C or G, at position 25283 is G or C, at positions 28453-28465 are -TCCGCGAGAGGGC- or positions 28453-28465 are deleted, at position 28543 is C or T, at position 28746 is A or C, at position 29904 is G or A, at position 37861 is C or T, at position 39834 is T or A, and at position 40018 is C or T.

[0201] In a further embodiment for the TNFRSF6 allele, the nucleotide of SEQ ID NO: 403 at position 1530 is T or C, at position 1550 is A or G, at position 14525 is G or A, at position 14714 is C or T, at position 18982 is G or C, at position 19069 is A or G, at position 20412 is A or G, at position 20552 is A or G, at position 23199 is G or A, at position 23416 is T or C, at position 24890 is A or G, at position 26359 is A or T, at position 1 926 is G or A, at position 2269 is G or A, at position 18934 is C or T, at position 19227 is C or T, and at position 22026 is C or G.

[0202] The above-described methods further comprise detecting the presence or absence of at least one allelic variant of a polymorphic region of another gene associated with Alzheimer's disease or neurodegenerative disease, wherein the presence of the two allelic variants is indicative of a positive or negative response.

[0203] Another gene associated with neurodegenerative disease or specifically Alzheimer's disease includes, but is not limited to, APOE4.

[0204] Detection can be by any suitable method including, but not limited to, sequencing, allele specific hybridization, primer specific extension, oligonucleotide ligation assay, restriction enzyme site analysis and single-stranded conformation polymorphism analysis.

[0205] Kits and Solid Supports

[0206] Also provided are kits for determining whether a subject has a predisposition for, protection against, and/or the presence of a neurodegenerative disease such as Alzheimer's disease. An exemplary kit for determining whether a subject has a predisposition for or the presence of a neurodegenerative disease, such as Alzheimer's disease, comprises at least one container means having disposed within at least one probe or primer disclosed herein. The kits can also provide at least one other container means having disposed within at least one probe or primer which specifically hybridizes adjacent to or at a polymorphic region of an APOE4 gene. Further provided are kits with instructions for use and/or other reagents useful for carry out detection.

[0207] Also provided is a solid support comprising a nucleic acid comprising at least one polymorphic region of an uPA, SNCG, IDE, LIPA, TNFRSF6 or KNSL1 gene and at least one polymorphic region of another gene associated with Alzheimer's disease. The other gene associated with Alzheimer's disease includes, but is not limited to APOE4. The solid support can be a microarray. Preparation of microarrays is well known in the art (see, e.g., U.S. Pat. Nos. 5,837,832; 5,858,659; 6,043,136; 6,043,031 and 6,156,501). Also provided are solid supports, such as microarrays, comprising one or more of the probes or primers disclosed herein.

[0208] Transgenic Animals

[0209] Further provided are transgenic animals comprising heterologous nucleic acid encoding human uPA, SNCG, IDE, LIPA, TNFRSF6 or KNSL1 proteins or portion thereof. The heterologous nucleic acid can be either a genomic sequence containing the complete gene or a portion thereof, or the complete cDNA or portion thereof. Heterologous nucleic acid, also encompasses other genes associated with Alzheimer's disease, including, but not limited to APOE. The transgenic nucleic acid is expressed in the animal. Expression in the animal may result in the production of uPA, SNCG, IDE, LIPA, TNFRSF6 or KNSL1 protein and/or one or more biological events characteristic of neurodegenerative diseases, including Alzheimer's disease. Exemplary transgenic animals include, but are not limited to, rodents, such as rats, mice, Drosophila melanogaster (D. melanogaster), Caenorhabditis elegans (C. elegans) and the like.

[0210] Exemplary transgenic animals, comprise heterologous nucleic acid encoding a human protein, or portion thereof, selected from the group of human proteins consisting of uPA, SNCG, IDE, KNSL, LIPA and TNFRSF6, wherein the heterologous nucleic acid comprises an allelic variant of one or more polymorphic regions occurring at a nucleotide position corresponding to one or more nucleotide positions, or complements thereof, selected from the group of consisting of: nucleotide positions 560, 590, 617, 645, 915, 987, 1723, 1943, 1950, 3151, 3178, 3189, 3284, 3779, 4156, 4276, 4311, 4552, 4976, 4995, 5019, 5025, 5112, 5136, 5517, 5421, 5648, 2533, 3371, 4627, 4727, 4813 and 5200 of SEQ ID NO: 73; nucleotide positions 2456, 3279, 3407, 42943, 62498, 69586, 107395, 112114, 116662, 17095, 17242, 33590, 38903, 43391, 45017, 68906, 68973, 73772, 74084, 83024, 83104, 89301, 105060, 108489, 111914, 113142, 113591, 114683, 117803 and 124565 of SEQ ID NO: 187 or the complement of SEQ ID NO: 484 nucleotide positions 820, 7066, 11758, 21270, 22225, 29294, 33452, 33708, 36982, 54862, 77786, 80594, 84792, 84997, 86682, 86857, 88511, 90437, 90593, 91650, 91870, 91878, 92011, 93618, 94344, 94714, 95671, 96324, 97302, 97370, 98253, 98276, 98385, 98646, 98814, 99597, 100378, 101029, 101265, 102465, 103289, 103967, 105793, 106076, 106453, 106600, 106995, 107851, 108434, 109096, 109399, 109483, 110870, 111189, 111972, 112627, 112629, 112631, 113407, 114444, 114482, 115473, 116681, 117226, 117600, 117802, 118223, 120011, 122260, 123165, 123424, 124352, 124501, 124692, 125113, 125159, 126568, 127166, 127598, 127600, 127609, 127614, 127623, 127662, 128053, 128261, 128289, 128291, 128393, 129444, 6078, 7106, 11758, 18267, 19581, 30078, 54862, 73841, 83448, 80304, 98276, 117802 and 129124; nucleotide positions 300, 1152, 14235, 15104, 20815, 35719, 36738-36739, 41015, 42125, 45083, 45887, 56706, 56887, 58524, 62661 and 63802 of SEQ ID NO: 348 or SEQ ID NO: 484 nucleotide positions 130876, 131378, 131616, 131620, 131688, 131998, 132004, 132370, 132697, 132968, 133355, 133806, 134030, 134291, 134661, 137087, 137142, 138396, 140665, 140736, 141173, 142056, 142777, 143025, 143729, 144484, 146181, 147051, 147322, 147707, 147842, 148080, 149026, 149044, 149389, 150003, 150384, 150454, 150686, 151343, 151961, 152119, 153791, 154328, 154513, 154639, 155049, 155114, 158040, 158895, 191284, 192272, 192698, 193706, 132370, 136968, 139284, 159167, 159403, 178748, 180149 and 180153; nucleotide positions 1197, 1307 to 1309, 1841, 1852, 2075, 6063, 6173, 6194, 7820, 25283, 28453 to 28465, 28543, 28746, 29904, 37861, 39834, 40018, 7219, 8242, 10114, 10606, 10688, 10729, 11559, 12031, 14497, 14729, 21145, 21329, 21404, 21429, 22246, 22354, 22621, 23802 and 25969 of SEQ ID NO: 468; and nucleotide positions 1530, 1550, 14525, 14714, 18982, 19069, 20412, 20552, 23199, 23416, 24890, 26359, 199, 213, 843, 2967, 3103, 5335, 5345, 6074, 9374, 9907, 9936, 10937, 11200, 11279, 11359, 11503, 11511, 11587, 11694, 11905, 12193, 12208, 12238, 18511, 18567, 20640, 21585, 22439, 25081, 26878, 27670, 1926, 2269, 18934, 19227 and 22026 of SEQ ID NO: 403.

[0211] Methods to Screen for a Biologically Active Agent

[0212] Further provided are in vitro and in vivo methods for screening test compounds to identify therapeutics for treating or preventing the development of a neurodegenerative disease, such as Alzheimer's disease. Also provided are methods to screen for biologically active agents that modulate the expression or activity of a uPA, SNCG, IDE, KNSL, LIPA and/or TNFRSF6 protein.

[0213] Further provided is a method of screening for an active agent that modulates a biological event characteristic of Alzheimer's disease (AD) in a subject, comprising (a) combining a candidate agent with a transgenic animal comprising a transgenic nucleotide sequence encoding an allelic variant of a uPA, SNCG, IDE, KNSL, LIPA and/or TNFRSF6 gene associated with the manifestation of Alzheimer's disease, stably integrated into the genome of the animal and operably linked to a promoter, wherein when the transgenic nucleic acid is expressed the transgenic animal develops one or more characteristics of Alzheimer's disease; and (b) determining the effect of the agent upon one or more characteristics of Alzheimer's disease.

[0214] Also provided are methods as described above, wherein the SNCG allelic variant comprises one or more polymorphic regions occurring at a nucleotide position corresponding to a nucleotide position selected from the group of nucleotide positions of SEQ ID NO: 73 consisting of 560, 590, 617, 645, 915, 987, 1723, 1943, 1950, 3151, 3178, 3189, 3284, 3779, 4156, 4276, 4311, 4552, 4976, 4995, 5019, 5025, 5112, 5136, 5517, 5421, 5648, 2533, 3371, 4627, 4727, 4813 and 5200, or the complement thereof; wherein the IDE allelic variant comprises one or more polymorphic regions occurring at a nucleotide position corresponding to a nucleotide position selected from the group of nucleotide positions of SEQ ID NO: 187 consisting of 2456, 3279, 3407, 42943, 62498, 69586, 107395, 112114, 116662, 17095, 17242, 33590, 38903, 43391, 45017, 68906, 68973, 73772, 74084, 83024, 83104, 89301, 105060, 108489, 111914, 113142, 113591, 114683, 117803 and 124565, or the complement thereof; or the IDE allelic variant comprises one or more polymorphic regions occurring at a nucleotide position complemetary to a nucleotide position selected from the group of nucleotide positions of SEQ ID NO: 484 consisting of 820, 7066, 11758, 21270, 22225, 29294, 33452, 33708, 36982, 54862, 77786, 80594, 84792, 84997, 86682, 86857, 88511, 90437, 90593, 91650, 91870, 91878, 92011, 93618, 94344, 94714, 95671, 96324, 97302, 97370, 98253, 98276, 98385, 98646, 98814, 99597, 100378, 101029, 101265, 102465, 103289, 103967, 105793, 106076, 106453, 106600, 106995, 107851, 108434, 109096, 109399, 109483, 110870, 111189, 111972, 112627, 112629, 112631, 113407, 114444, 114482, 115473, 116681, 117226, 117600, 117802, 118223, 120011, 122260, 123165, 123424, 124352, 124501, 124692, 125113, 125159, 126568, 127166, 127598, 127600, 127609, 127614, 127623, 127662, 128053, 128261, 128289, 128291, 128393, 129444, 6078, 7106, 11758, 18267, 19581, 30078, 54862, 73841, 83448, 80304, 98276, 117802 and 129124, or the complement thereof; wherein the KNSL1 allelic variant comprises one or more polymorphic regions occurring at a nucleotide position corresponding to a nucleotide position selected from the group of nucleotide positions of SEQ ID NO: 348 consisting of 300, 1152, 14235, 15104, 20815, 35719, 36738-36739, 41015, 42125, 45083, 45887, 56706, 56887, 58524, 62661 and 63802, or the complement thereof; or the KNSL1 allelic variant comprises one or more polymorphic regions occurring at a nucleotide position corresponding to a nucleotide position selected from the group of nucleotide positions of SEQ ID NO: 484 consisting of 130876, 131378, 131616, 131620, 131688, 131998, 132004, 132370, 132697, 132968, 133355, 133806, 134030, 134291, 134661, 137087, 137142, 138396, 140665, 140736, 141173, 142056, 142777, 143025, 143729, 144484, 146181, 147051, 147322, 147707, 147842, 148080, 149026, 149044, 149389, 150003, 150384, 150454, 150686, 151343, 151961, 152119, 153791, 154328, 154513, 154639, 155049, 155114, 158040, 158895, 191284, 192272, 192698, 193706, 132370, 136968, 139284, 159167, 159403, 178748, 180149 and 180153, or the complement thereof; wherein the LIPA allelic variant comprises one or more polymorphic regions occurring at a nucleotide position corresponding to a nucleotide position selected from the group of nucleotide positions of SEQ ID NO: 468 consisting of 1197, 1307 to 1309, 1841, 1852, 2075, 6063, 6173, 6194, 7820, 25283, 28453 to 28465, 28543, 28746, 29904, 37861, 39834, 40018, 7219, 8242, 10114, 10606, 10688, 10729, 11559, 12031, 14497, 14729, 21145, 21329, 21404, 21429, 22246, 22354, 22621, 23802 and 25969, or the complement thereof; wherein the TNFRSF6 allelic variant comprises one or more polymorphic regions occurring at a nucleotide position corresponding to a nucleotide position selected from the group of nucleotide positions of SEQ ID NO: 403 consisting of 1530, 1550, 14525, 14714, 18982, 19069, 20412, 20552, 23199, 23416, 24890, 26359, 199, 213, 843, 2967, 3103, 5335, 5345, 6074, 9374, 9907, 9936, 10937, 11200, 11279, 11359, 11503, 11511, 11587, 11694, 11905, 12193, 12208, 12238, 18511, 18567, 20640, 21585, 22439, 25081, 26878, 27670, 1926, 2269, 18934, 19227 and 22026, or the complement thereof.

[0215] Also provided is a method of screening for biologically active agents that modulate the expression or activity of a uPA, SNCG, IDE, KNSL, LIPA or TNFRSF6 protein, comprising combining a candidate agent with a cell comprising a nucleotide sequence which is an allelic variant of the uPA, SNCG, IDE, KNSL, LIPA or TNFRSF6 gene, wherein said allelic variant comprises one or more polymorphic regions occurring at a nucleotide position corresponding to a nucleotide position selected from: SEQ ID NO: 73 nucleotide positions 560, 590, 617, 645, 915, 987, 1723, 1943, 1950, 3151, 3178, 3189, 3284, 3779, 4156, 4276, 4311, 4552, 4976, 4995, 5019, 5025, 5112, 5136, 5517, 5421, 5648, 2533, 3371, 4627, 4727, 4813 and 5200, or the complement thereof; SEQ ID NO: 187 nucleotide positions 2456, 3279, 3407, 42943, 62498, 69586, 107395, 112114, 116662, 17095, 17242, 33590, 38903, 43391, 45017, 68906, 68973, 73772, 74084, 83024, 83104, 89301, 105060, 108489, 111914, 113142, 113591, 114683, 117803 and 124565, or the complement thereof, SEQ ID NO: 484 IDE nucleotide positions 820, 7066, 11758, 21270, 22225, 29294, 33452, 33708, 36982, 54862, 77786, 80594, 84792, 84997, 86682, 86857, 88511, 90437, 90593, 91650, 91870, 91878, 92011, 93618, 94344, 94714, 95671, 96324, 97302, 97370, 98253, 98276, 98385, 98646, 98814, 99597, 100378, 101029, 101265, 102465, 103289, 103967, 105793, 106076, 106453, 106600, 106995, 107851, 108434, 109096, 109399, 109483, 110870, 111189, 111972, 112627, 112629, 112631, 113407, 114444, 114482, 115473, 116681, 117226, 117600, 117802, 118223, 120011, 122260, 123165, 123424, 124352, 124501, 124692, 125113, 125159, 126568, 127166, 127598, 127600, 127609, 127614, 127623, 127662, 128053, 128261, 128289, 128291, 128393, 129444, 6078, 7106, 11758, 18267, 19581, 30078, 54862, 73841, 83448, 80304, 98276, 117802 and 129124, or the complement thereof; SEQ ID NO: 348 nucleotide positions 300, 1152, 14235, 15104, 20815, 35719, 36738-36739, 41015, 42125, 45083, 45887, 56706, 56887, 58524, 62661 and 63802, or the complement thereof, or SEQ ID NO: 484 nucleotide positions 130876, 131378, 131616, 131620, 131688, 131998, 132004, 132370, 132697, 132968, 133355, 133806, 134030, 134291, 134661, 137087, 137142, 138396, 140665, 140736, 141173, 142056, 142777, 143025, 143729, 144484, 146181, 147051, 147322, 147707, 147842, 148080, 149026, 149044, 149389, 150003, 150384, 150454, 150686, 151343, 151961, 152119, 153791, 154328, 154513, 154639, 155049, 155114, 158040, 158895, 191284, 192272, 192698, 193706, 132370, 136968, 139284, 159167, 159403, 178748, 180149 and 180153, or the complement thereof; SEQ ID NO: 468 nucleotide positions 1197, 1307 to 1309, 1841, 1852, 2075, 6063, 6173, 6194, 7820, 25283, 28453 to 28465, 28543, 28746, 29904, 37861, 39834, 40018, 7219, 8242, 10114, 10606, 10688, 10729, 11559, 12031, 14497, 14729, 21145, 21329, 21404, 21429, 22246, 22354, 22621, 23802 and 25969, or the complement thereof; and SEQ ID NO: 403 consisting of 1530, 1550, 14525, 14714, 18982, 19069, 20412, 20552, 23199, 23416, 24890, 26359, 199, 213, 843, 2967, 3103, 5335, 5345, 6074, 9374, 9907, 9936, 10937, 11200, 11279, 11359, 11503, 11511, 11587, 11694, 11905, 12193, 12208, 12238, 18511, 18567, 20640, 21585, 22439, 25081, 26878, 27670, 1926, 2269, 18934, 19227 and 22026, or the complement thereof; and operably linked to a promoter such that the nucleotide sequence is expressed as a uPA, SNCG, IDE, KNSL, LIPA or TNFRSF6 protein in the cell; and determining the effect of the agent upon the expression and/or activity of the respective uPA, SNCG, IDE, KNSL, LIPA or TNFRSF6 protein.

[0216] cDNAS

[0217] Provided herein are cDNAs including, among others, an isolated nucleic acid encoding a polymorphic SNCG protein comprising the coding region or full-length of SEQ ID NO: 469 having variant nucleotides corresponding to positions: 30, 57, 85, 243, 250, 377, 512, 531, 555, 561 and 672 of SEQ ID NO: 469. In a particular embodiment, the isolated nucleic acid encoding a polymorphic SNCG protein, comprises SEQ ID NO: 469, wherein the nucleotide at position 672 is not T. In another embodiment, the nucleotide at position 672 of SEQ ID NO: 469 is A.

[0218] Also provided herein are cDNAs encoding IDE protein comprising the coding region or full-length of SEQ ID NO: 470 having a variant nucleotide corresponding to position 7 of SEQ ID NO: 470, wherein the nucleotide at position 7 is not C. In a particular embodiment, the nucleotide at position 7 of SEQ ID NO: 470 is T.

[0219] Also provided herein are cDNAs encoding a polymorphic KNSL1 protein comprising the coding region or full-length of: SEQ ID NO: 471 having a variant nucleotide at position 2747 of SEQ ID NO: 471; SEQ ID NO: 473 having a variant nucleotide at position 2610 of SEQ ID NO: 473; SEQ ID NO: 475 having a variant nucleotide at position 2695 of SEQ ID NO: 475, wherein the variant nucleotide at each of these positions is not C. In a particular embodiment, the nucleotide at position 2747 of SEQ ID NO: 471, at position 2610 of SEQ ID NO: 473, and at position 2695 of SEQ ID NO: 475 is T, which results in a cysteine at amino acid 869 in the translated protein.

[0220] Also provided herein are cDNAs encoding a polymorphic TNFRSF6 protein comprising the coding region or full-length of SEQ ID NO: 477 having variant nucleotides corresponding to positions 208 and 420 of SEQ ID NO: 477. In a particular embodiment, the isolated nucleic acid encoding a polymorphic TNFRSF6 protein, comprises SEQ ID NO: 477, wherein the nucleotide at position 208 is not G. In another embodiment, the nucleotide at position 208 of SEQ ID NO: 477 is A.

[0221] Also provided herein are cDNAs encoding TNFRSF6 protein comprising the coding region or full-length of SEQ ID NO: 478 having variant nucleotides corresponding to positions 377, 416, 836 and 1766 of SEQ ID NO: 478. In a particular embodiment, the isolated nucleic acid encoding a polymorphic TNFRSF6 protein, comprises SEQ ID NO: 478, wherein the nucleotide at position 377 is not G. In another embodiment, the nucleotide at position 377 of SEQ ID NO: 478 is A.

[0222] Also provide herein are cDNAs encoding TNFRSF6 protein comprising the coding region or full-length of SEQ ID NO: 479 having variant nucleotides corresponding to positions 403, 442, 862 and 1792 of SEQ ID NO: 479. In a particular embodiment, the isolated nucleic acid encoding a polymorphic TNFRSF6 protein, comprises SEQ ID NO: 479, wherein the nucleotide at position 403 is not G. In another embodiment, the nucleotide at position 403 of SEQ ID NO: 479 is A.

[0223] Also provide herein are cDNAs encoding TNFRSF6 protein comprising the coding region or full-length of SEQ ID NO: 480 having variant nucleotides corresponding to positions 208, 247 and 604 of SEQ ID NO: 480. In a particular embodiment, the isolated nucleic acid encoding a polymorphic TNFRSF6 protein, comprises SEQ ID NO: 480, wherein the nucleotide at position 208 is not G. In another embodiment, the nucleotide at position 208 of SEQ ID NO: 480 is A.

[0224] Also provide herein are cDNAs encoding TNFRSF6 protein comprising the coding region or full-length of SEQ ID NO: 481 having variant nucleotides corresponding to positions 208 and 247 of SEQ ID NO: 481. In a particular embodiment, the isolated nucleic acid encoding a polymorphic TNFRSF6 protein, comprises SEQ ID NO: 481, wherein the nucleotide at position 208 is not G. In another embodiment, the nucleotide at position 208 of SEQ ID NO: 481 is A.

[0225] Also provided herein is an isolated nucleic acid encoding a polymorphic LIPA protein comprising the coding region or full-length of SEQ ID NO: 482 having variant nucleotides corresponding to positions: 86, 107, 2149, and 2333 of SEQ ID NO: 482. In a particular embodiment, the isolated nucleic acid encoding a polymorphic LIPA protein, comprises SEQ ID NO: 482, wherein the nucleotide at position 2333 of SEQ ID NO: 482 is not C. In another embodiment, the nucleotide at position 2333 of SEQ ID NO: 482 is T.

[0226] Methods for Detecting Altered Levels of Risk

[0227] Also provided are methods for detecting an altered level of risk for neurodegenerative disease, such as AD, in a subject, comprising:

[0228] the step of detecting in a target nucleic acid obtained from the subject the presence of an allelic variant of one or more polymorphic regions of one or more genes selected from the group consisting of uPA, SNCG, IDE, KNSL, LIPA and TNFRSF6, wherein the presence of at least one of the allelic variant of one or more polymorphic regions is indicative of an altered level of risk for the neurodegenerative disease compared to a subject not having the allelic variant.

[0229] In one embodiment, the altered level of risk corresponds to a predisposition for a neurodegenerative disease. In another embodiment, the altered level of risk corresponds to protection from the neurodegenerative disease. Exemplary polymorphic regions and particular allelic variants for use in these methods include those set forth in the Examples at Tables 2, 4 and 4-B, 6 and 6-B, 8, 10 12 and 12-B as well as Tables A-F.

[0230] Methods for Treating a Subject Manifesting an AD Phenotype

[0231] Further provided are methods of treating a subject manifesting an Alzheimer's disease phenotype. Certain ambiguous phenotypes, e.g., dementia, manifested in AD also occur in connection with other diseases and conditions which may be treated using drugs and other treatments that are different from drugs and methods used to treat AD. Genotyping of chromosome 10 polymorphic regions described herein, and optionally other AD-associated markers, in subjects manifesting such an AD phenotype(s) permits confirmation of AD diagnoses and assists in distinguishing between AD and other possible diseases or disorders. Once an individual is genotyped as having or being predisposed to AD, he or she may be treated with any known methods effective in treating AD.

[0232] Accordingly, methods provided herein of treating a subject manifesting an Alzheimer's disease phenotype, include steps of (a) detecting in nucleic acid obtained from the subject the presence or absence of an allelic variant of one or more polymorphic regions of one or more genes associated with AD selected from the group consisting of uPA, SNCG, IDE, KNSL1, LIPA and TNFRSF6, wherein the presence of at least one of said allelic variant of one or more polymorphic regions is indicative of the occurrence of AD, and (b) selecting a treatment plan that is effective for treatment of Alzheimer's disease. In particular embodiments of these methods, the presence or absence of a particular allelic variant is detected at one or more of polymorphic regions (e.g., SNPs and the like) listed herein throughout the specification, including in Tables 2, 4 and 4-B, 6 and 6-B, 8, 10, 12 and 12-B and Tables A through F, as well as FIGS. 1 through 10. In further embodiments of these methods, the one or more polymorphic regions of the SNCG occurs at a nucleotide position corresponding to a nucleotide position selected from the group of nucleotide positions of SEQ ID NO: 73 consisting of 560, 590, 617, 645, 915, 987, 1723, 1943, 1950, 3151, 3178, 3189, 3284, 3779, 4156, 4276, 4311, 4552, 4976, 4995, 5019, 5025, 5112, 5136, 5517, 5421, 5648, 2533, 3371, 4627, 4727, 4813 and 5200, or the complement thereof; the one or more polymorphic regions of the IDE gene occurs at a nucleotide position corresponding to a nucleotide position selected from the group of nucleotide positions of SEQ ID NO: 187 consisting of 2456, 3279, 3407, 42943, 62498, 69586, 107395, 112114, 116662, 17095, 17242, 33590, 38903, 43391, 45017, 68906, 68973, 73772, 74084, 83024, 83104, 89301, 105060, 108489, 111914, 113142, 113591, 114683, 117803 and 124565, or the complement thereof, or of SEQ ID NO: 484 IDE consisting of 820, 7066, 11758, 21270, 22225, 29294, 33452, 33708, 36982, 54862, 77786, 80594, 84792, 84997, 86682, 86857, 88511, 90437, 90593, 91650, 91870, 91878, 92011, 93618, 94344, 94714, 95671, 96324, 97302, 97370, 98253, 98276, 98385, 98646, 98814, 99597, 100378, 101029, 101265, 102465, 103289, 103967, 105793, 106076, 106453, 106600, 106995, 107851, 108434, 109096, 109399, 109483, 110870, 111189, 111972, 112627, 112629, 112631, 113407, 114444, 114482, 115473, 116681, 117226, 117600, 117802, 118223, 120011, 122260, 123165, 123424, 124352, 124501, 124692, 125113, 125159, 126568, 127166, 127598, 127600, 127609, 127614, 127623, 127662, 128053, 128261, 128289, 128291, 128393, 129444, 6078, 7106, 11758, 18267, 19581, 30078, 54862, 73841, 83448, 80304, 98276, 117802 and 129124, or the complement thereof; the one or more polymorphic regions of the KNSL1 gene occurs at a nucleotide position corresponding to a nucleotide position selected from the group of nucleotide positions of SEQ ID NO: 348 consisting of 300, 1152, 14235, 15104, 20815, 35719, 36738-36739, 41015, 42125, 45083, 45887, 56706, 56887, 58524, 62661 and 63802, or the complement thereof or of SEQ ID NO: 484 consisting of 130876, 131378, 131616, 131620, 131688, 131998, 132004, 132370, 132697, 132968, 133355, 133806, 134030, 134291, 134661, 137087, 137142, 138396, 140665, 140736, 141173, 142056, 142777, 143025, 143729, 144484, 146181, 147051, 147322, 147707, 147842, 148080, 149026, 149044, 149389, 150003, 150384, 150454, 150686, 151343, 151961, 152119, 153791, 154328, 154513, 154639, 155049, 155114, 158040, 158895, 191284, 192272, 192698, 193706, 132370, 136968, 139284, 159167, 159403, 178748, 180149 and 180153, or the complement thereof; the one or more polymorphic regions of the LIPA gene occurs at a nucleotide position corresponding to a nucleotide position selected from the group of nucleotide positions of SEQ ID NO: 468 consisting of 1197, 1307 to 1309, 1841, 1852, 2075, 6063, 6173, 6194, 7820, 25283, 28453 to 28465, 28543, 28746, 29904, 37861, 39834, 40018, 7219, 8242, 10114, 10606, 10688, 10729, 11559, 12031, 14497, 14729, 21145, 21329, 21404, 21429, 22246, 22354, 22621, 23802 and 25969, or the complement thereof; the one or more polymorphic regions of the TNFRSF6 gene occurs at a nucleotide position corresponding to a nucleotide position selected from the group of nucleotide positions of SEQ ID NO: 403 consisting of 1530, 1550, 14525, 14714, 18982, 19069, 20412, 20552, 23199, 23416, 24890, 26359, 199, 213, 843, 2967, 3103, 5335, 5345, 6074, 9374, 9907, 9936, 10937, 11200, 11279, 11359, 11503, 11511, 11587, 11694, 11905, 12193, 12208, 12238, 18511, 18567, 20640, 21585, 22439, 25081, 26878, 27670, 1926, 2269, 18934, 19227 and 22026, or the complement thereof.

[0233] Also provided are methods for detecting the presence or absence of a polymorphism of a uPA, SNCG, IDE, KNSL1, TNFRSF6 or LIPA gene. These methods can include a step of determining the identity of the nucleotide at a position corresponding to a nucleotide position selected from the group consisting of:

[0234] a SNCG nucleotide position of SEQ ID NO: 73, or the complement thereof, selected from the group consisting of nucleotide positions 915, 987, 2533, 3151, 3178, 3189, 3284, 3371, 3779, 4156, 4276, 4311, 4627, 4727, 4813, 5136, 5200 and 5517;

[0235] an IDE nucleotide position of SEQ ID NO: 187, or the complement thereof, selected from the group consisting of nucleotide positions 2456, 3279, 3407, 42943, 62498, 69586, 107395 and 112114; or a nucleotide position of SEQ ID NO: 484, or the complement thereof, selected from the group consisting of nucleotide positions 820, 7066, 11758, 21270, 22225, 29294, 33452, 33708, 36982, 54862, 77786, 80594, 84792, 84997, 86682, 86857, 88511, 90437, 90593, 91650, 91870, 91878, 92011, 93618, 94344, 94714, 95671, 96324, 97302, 97370, 98253, 98276, 98385, 98646, 98814, 99597, 100378, 101029, 101265, 102465, 103289, 103967, 105793, 106076, 106453, 106600, 106995, 107851, 108434, 109096, 109399, 109483, 110870, 111189, 111972, 112627, 112629, 112631, 113407, 114444, 114482, 115473, 116681, 117226, 117600, 117802, 118223, 120011, 122260, 123165, 123424, 124352, 124501, 124692, 125113, 125159, 126568, 127166, 127598, 127600, 127609, 127614, 127623, 127662, 128053, 128261, 128289, 128291, 128393, and 129444;

[0236] a KNSL1 allele spanning a nucleotide position of SEQ ID NO: 348, or the complement thereof, selected from the group consisting of nucleotide positions 300, 1152, 14235, 15104, 20815, 36738-36739, 41015, 42125, 56706, 56887 and 58524; or a nucleotide position of SEQ ID NO: 484, or the complement thereof, selected from the group consisting of nucleotide positions 130876, 131378, 131616, 131620, 131688, 131998, 132004, 132370, 132697, 132968, 133355, 133806, 134030, 134291, 134661, 137087, 137142, 138396, 140665, 140736, 141173, 142056, 142777, 143025, 143729, 144484, 146181, 147051, 147322, 147707, 147842, 148080, 149026, 149044, 149389, 150003, 150384, 150454, 150686, 151343, 151961, 152119, 153791, 154328, 154513, 154639, 155049, 155114,-158040, 158895, 191284, 192272, 192698, and 193706;

[0237] a LIPA nucleotide position of SEQ ID NO: 468, or the complement thereof, selected from the group consisting of nucleotide positions 1197, 7820, 28543 and 28746;

[0238] a TNFRSF6 nucleotide position of SEQ ID NO: 403, or the complement thereof, selected from the group consisting of nucleotide positions 1530, 14525, 14714, 19069, 20412, 20552, 23199, 23416, 1926 and 2269; and

[0239] a uPA nucleotide position of SEQ ID NO: 569 or 560, or the complement thereof, selected from the group consisting of 401, 515, 748 and 1752; and of SEQ ID NO: 563, or the complement thereof, consisting of 93 and 714-715.

[0240] Further provided are methods for identifying a polymorphism or combination of polymorphisms associated with neurodegenerative disease. Such methods can include a step of testing one or more polymorphisms in a uPA, SNCG, IDE, KNSL1, TNFRSF6 or LIPA gene individually and/or in combinations for genetic association with a neurodegenerative disease.

[0241] Methods for identifying a polymorphism or combination of polymorphisms associated with a uPA, SNCG, IDE, KNSL1, TNFRSF6 or LIPA-mediated disease or disorder are also provided. Such methods can include a step of testing one or more polymorphisms in a urokinase plasminogen activator gene individually and/or in combinations for genetic association with a uPA, SNCG, IDE, KNSL1, TNFRSF6 or LIPA-mediated disease or disorder, wherein the one or more polymorphisms occurs at nucleotide positions corresponding to a nucleotide position selected from the group consisting of:

[0242] a SNCG nucleotide position of SEQ ID NO: 73, or the complement thereof, selected from the group consisting of nucleotide positions 915, 987, 2533, 3151, 3178, 3189, 3284, 3371, 3779, 4156, 4276, 4311, 4627, 4727, 4813, 5136, 5200 and 5517;

[0243] an IDE nucleotide position of SEQ ID NO: 187, or the complement thereof, selected from the group consisting of nucleotide positions 2456, 3279, 3407, 42943, 62498, 69586, 107395 and 112114; or a nucleotide position of SEQ ID NO: 484, or the complement thereof, selected from the group consisting of nucleotide positions 820, 7066, 11758, 21270, 22225, 29294, 33452, 33708, 36982, 54862, 77786, 80594, 84792, 84997, 86682, 86857, 88511, 90437, 90593, 91650, 91870, 91878, 92011, 93618, 94344, 94714, 95671, 96324, 97302, 97370, 98253, 98276, 98385, 98646, 98814, 99597, 100378, 101029, 101265, 102465, 103289, 103967, 105793, 106076, 106453, 106600, 106995, 107851, 108434, 109096, 109399, 109483, 110870, 111189, 111972, 112627, 112629, 112631, 113407, 114444, 114482, 115473, 116681, 117226, 117600, 117802, 118223, 120011, 122260, 123165, 123424, 124352, 124501, 124692, 125113, 125159, 126568, 127166, 127598, 127600, 127609, 127614, 127623, 127662, 128053, 128261, 128289, 128291, 128393, and 129444;

[0244] a KNSL1 allele spanning a nucleotide position of SEQ ID NO: 348, or the complement thereof, selected from the group consisting of nucleotide positions 300, 1152, 14235, 15104, 20815, 36738-36739, 41015, 42125, 56706, 56887 and 58524; or a nucleotide position of SEQ ID NO: 484, or the complement thereof, selected from the group consisting of nucleotide positions 130876, 131378, 131616, 131620, 131688, 131998, 132004, 132370, 132697, 132968, 133355, 133806, 134030, 134291, 134661, 137087, 137142, 138396, 140665, 140736, 141173, 142056, 142777, 143025, 143729, 144484, 146181, 147051, 147322, 147707, 147842, 148080, 149026, 149044, 149389, 150003, 150384, 150454, 150686, 151343, 151961, 152119, 153791, 154328, 154513, 154639, 155049, 155114, 158040, 158895, 191284, 192272, 192698, and 193706;

[0245] a LIPA nucleotide position of SEQ ID NO: 468, or the complement thereof, selected from the group consisting of nucleotide positions 1197, 7820, 28543 and 28746;

[0246] a TNFRSF6 nucleotide position of SEQ ID NO: 403, or the complement thereof, selected from the group consisting of nucleotide positions 1530, 14525, 14714, 19069, 20412, 20552, 23199, 23416, 1926 and 2269; and

[0247] a uPA nucleotide position of SEQ ID NO: 569 or 560, or the complement thereof, selected from the group consisting of 401, 515, 748 and 1752; and of SEQ ID NO: 563, or the complement thereof, consisting of 93 and 714-715.

[0248] Also provided are methods for detecting the presence or absence in a subject of one or more polymorphisms associated individually and/or in combination with a neurodegenerative disease or disorder which include a step of detecting in nucleic acid obtained from the subject the presence or absence of one or more polymorphisms in the uPA, SNCG, IDE, KNSL1, TNFRSF6 or LIPA gene, wherein individually and/or in combination the polymorphisms are associated with a neurodegenerative disease or disorder. The neurodegenerative disease or disorder can be Alzheimer's disease. The Alzheimer's disease can be a disease with onset ages of greater than or equal to about 50 years, or greater than or equal to about 60 years, or greater than or equal to about 65 years. The association between the one or more polymorphisms and Alzheimer's disease can be such that it yields a positive result in a family-based test for association. In particular methods, the positive result is a P value less than or equal to 0.05. In one embodiment, the positive result is a P value less than 0.05. In some embodiments, the P value is a value obtained after correction in which the probability value required to give significance is divided by the number of tests conducted.

[0249] Methods for detecting the presence or absence in a subject of a polymorphism or a combination of polymorphisms that is associated with a uPA, SNCG, IDE, KNSL1, TNFRSF6 or LIPA-mediated disease or disorder are also provided. These methods can include a step of detecting in nucleic acid obtained from the subject the presence or absence of one or more polymorphisms in a uPA, SNCG, IDE, KNSL1, TNFRSF6 or LIPA gene, wherein the one or more polymorphisms occurs at nucleotide positions corresponding to a nucleotide position selected from the group consisting of:

[0250] a SNCG nucleotide position of SEQ ID NO: 73, or the complement thereof, selected from the group consisting of nucleotide positions 915, 987, 2533, 3151, 3178, 3189, 3284, 3371, 3779, 4156, 4276, 4311, 4627, 4727, 4813, 5136, 5200 and 5517;

[0251] an IDE nucleotide position of SEQ ID NO: 187, or the complement thereof, selected from the group consisting of nucleotide positions 2456, 3279, 3407, 42943, 62498, 69586, 107395 and 112114; or a nucleotide position of SEQ ID NO: 484, or the complement thereof, selected from the group consisting of nucleotide positions 820, 7066, 11758, 21270, 22225, 29294, 33452, 33708, 36982, 54862, 77786, 80594, 84792, 84997, 86682, 86857, 88511, 90437, 90593, 91650, 91870, 91878, 92011, 93618, 94344, 94714, 95671, 96324, 97302, 97370, 98253, 98276, 98385, 98646, 98814, 99597, 100378, 101029, 101265, 102465, 103289, 103967, 105793, 106076, 106453, 106600, 106995, 107851, 108434, 109096, 109399, 109483, 110870, 111189, 111972, 112627, 112629, 112631, 113407, 114444, 114482, 115473, 116681, 117226, 117600, 117802, 118223, 120011, 122260, 123165, 123424, 124352, 124501, 124692, 125113, 125159, 126568, 127166, 127598, 127600, 127609, 127614, 127623, 127662, 128053, 128261, 128289, 128291, 128393, and 129444;

[0252] a KNSL1 allele spanning a nucleotide position of SEQ ID NO: 348, or the complement thereof, selected from the group consisting of nucleotide positions 300, 1152, 14235, 15104, 20815, 36738-36739, 41015, 42125, 56706, 56887 and 58524; or a nucleotide position of SEQ ID NO: 484, or the complement thereof, selected from the group consisting of nucleotide positions 130876, 131378, 131616, 131620, 131688, 131998, 132004, 132370, 132697, 132968, 133355, 133806, 134030, 134291, 134661, 137087, 137142, 138396, 140665, 140736, 141173, 142056, 142777, 143025, 143729, 144484, 146181, 147051, 147322, 147707, 147842, 148080, 149026, 149044, 149389, 150003, 150384, 150454, 150686, 151343, 151961, 152119, 153791, 154328, 154513, 154639, 155049, 155114, 158040, 158895, 191284, 192272, 192698, and 193706;

[0253] a LIPA nucleotide position of SEQ ID NO: 468, or the complement thereof, selected from the group consisting of nucleotide positions 1197, 7820, 28543 and 28746;

[0254] a TNFRSF6 nucleotide position of SEQ ID NO: 403, or the complement thereof, selected from the group consisting of nucleotide positions 1530, 14525, 14714, 19069, 20412, 20552, 23199, 23416, 1926 and 2269; and

[0255] a uPA nucleotide position of SEQ ID NO: 569 or 560, or the complement thereof, selected from the group consisting of 401, 515, 748 and 1752; and of SEQ ID NO: 563, or the complement thereof, consisting of 93 and 714-715.

[0256] In particular embodiments of these methods, the neurodegenerative disease or disorder is Alzheimer's disease. The Alzheimer's disease can be a disease with onset ages of greater than or equal to about 50 years, or greater than or equal to about 60 years, or greater than or equal to about 65 years. The association between the one or more polymorphisms and Alzheimer's disease can be such that it yields a positive result in a family-based test for association. In particular methods, the positive result is a P value less than or equal to 0.05. In one embodiment, the positive result is a P value less than 0.05. In some embodiments, the P value is a value obtained after correction in which the probability value required to give significance is divided by the number of tests conducted.

[0257] Also provided are methods for determining a predisposition to or the occurrence of a uPA, SNCG, IDE, KNSL1, TNFRSF6 or LIPA-mediated disease or disorder in a subject. These methods can include a step of:

[0258] detecting in a nucleic acid obtained from the subject the presence or absence of one or more polymorphisms of a uPA, SNCG, IDE, KNSL1, TNFRSF6 or LIPA gene, wherein the one or more polymorphisms occur at nucleotide positions corresponding to nucleotide positions selected from the group consisting of:

[0259] a SNCG nucleotide position of SEQ ID NO: 73, or the complement thereof, selected from the group consisting of nucleotide positions 915, 987, 2533, 3151, 3178, 3189, 3284, 3371, 3779, 4156, 4276, 4311, 4627, 4727, 4813, 5136, 5200 and 5517;

[0260] an IDE nucleotide position of SEQ ID NO: 187, or the complement thereof, selected from the group consisting of nucleotide positions 2456, 3279, 3407, 42943, 62498, 69586, 107395 and 112114; or a nucleotide position of SEQ ID NO: 484, or the complement thereof, selected from the group consisting of nucleotide positions 820, 7066, 11758, 21270, 22225, 29294, 33452, 33708, 36982, 54862, 77786, 80594, 84792, 84997, 86682, 86857, 88511, 90437, 90593, 91650, 91870, 91878, 92011, 93618, 94344, 94714, 95671, 96324, 97302, 97370, 98253, 98276, 98385, 98646, 98814, 99597, 100378, 101029, 101265, 102465, 103289, 103967, 105793, 106076, 106453, 106600, 106995, 107851, 108434, 109096, 109399, 109483, 110870, 111189, 111972, 112627, 112629, 112631, 113407, 114444, 114482, 115473, 116681, 117226, 117600, 117802, 118223, 120011, 122260, 123165, 123424, 124352, 124501, 124692, 125113, 125159, 126568, 127166, 127598, 127600, 127609, 127614, 127623, 127662, 128053, 128261, 128289, 128291, 128393, and 129444;

[0261] a KNSL1 allele spanning a nucleotide position of SEQ ID NO: 348, or the complement thereof, selected from the group consisting of nucleotide positions 300, 1152, 14235, 15104, 20815, 36738-36739, 41015, 42125, 56706, 56887 and 58524; or a nucleotide position of SEQ ID NO: 484, or the complement thereof, selected from the group consisting of nucleotide positions 130876, 131378, 131616, 131620, 131688, 131998, 132004, 132370, 132697, 132968, 133355, 133806, 134030, 134291, 134661, 137087, 137142, 138396, 140665, 140736, 141173, 142056, 142777, 143025, 143729, 144484, 146181, 147051, 147322, 147707, 147842, 148080, 149026, 149044, 149389, 150003, 150384, 150454, 150686, 151343, 151961, 152119, 153791, 154328, 154513, 154639, 155049, 155114, 158040, 158895, 191284, 192272, 192698, and 193706;

[0262] a LIPA nucleotide position of SEQ ID NO: 468, or the complement thereof, selected from the group consisting of nucleotide positions 1197, 7820, 28543 and 28746;

[0263] a TNFRSF6 nucleotide position of SEQ ID NO: 403, or the complement thereof, selected from the group consisting of nucleotide positions 1530, 14525, 14714, 19069, 20412, 20552, 23199, 23416, 1926 and 2269; and

[0264] a uPA nucleotide position of SEQ ID NO: 569 or 560, or the complement thereof, selected from the group consisting of 401, 515, 748 and 1752; and of SEQ ID NO: 563, or the complement thereof, consisting of 93 and 714-715;

[0265] wherein the presence of at least one polymorphism is indicative of a predisposition to or the occurrence of a uPA, SNCG, IDE, KNSL1, TNFRSF6 or LIPA-mediated disease or disorder.

[0266] Methods for predicting a response of a subject to an agent used to treat a uPA, SNCG, IDE, KNSL1, TNFRSF6 or LIPA-mediated disease are further provided. These methods can include a step of:

[0267] detecting in nucleic acid obtained from the subject the presence or absence of one or more polymorphisms of a uPA, SNCG, IDE, KNSL1, TNFRSF6 or LIPA gene that occur at nucleotide positions corresponding to nucleotide positions selected from the group consisting of:

[0268] a SNCG nucleotide position of SEQ ID NO: 73, or the complement thereof, selected from the group consisting of nucleotide positions 915, 987, 2533, 3151, 3178, 3189, 3284, 3371, 3779, 4156, 4276, 4311, 4627, 4727, 4813, 5136, 5200 and 5517;

[0269] an IDE nucleotide position of SEQ ID NO: 187, or the complement thereof, selected from the group consisting of nucleotide positions 2456, 3279, 3407, 42943, 62498, 69586, 107395 and 112114; or a nucleotide position of SEQ ID NO: 484, or the complement thereof, selected from the group consisting of nucleotide positions 820, 7066, 11758, 21270, 22225, 29294, 33452, 33708, 36982, 54862, 77786, 80594, 84792, 84997, 86682, 86857, 88511, 90437, 90593, 91650, 91870, 91878, 92011, 93618, 94344, 94714, 95671, 96324, 97302, 97370, 98253, 98276, 98385, 98646, 98814, 99597, 100378, 101029, 101265, 102465, 103289, 103967, 105793, 106076, 106453, 106600, 106995, 107851, 108434, 109096, 109399, 109483, 110870, 111189, 111972, 112627, 112629, 112631, 113407, 114444, 114482, 115473, 116681, 117226, 117600, 117802, 118223, 120011, 122260, 123165, 123424, 124352, 124501, 124692, 125113, 125159, 126568, 127166, 127598, 127600, 127609, 127614, 127623, 127662, 128053, 128261, 128289, 128291, 128393, and 129444;

[0270] a KNSL1 allele spanning a nucleotide position of SEQ ID NO: 348, or the complement thereof, selected from the group consisting of nucleotide positions 300, 1152, 14235, 15104, 20815, 36738-36739, 41015, 42125, 56706, 56887 and 58524; or a nucleotide position of SEQ ID NO: 484, or the complement thereof, selected from the group consisting of nucleotide positions 130876, 131378, 131616, 131620, 131688, 131998, 132004, 132370, 132697, 132968, 133355, 133806, 134030, 134291, 134661, 137087, 137142, 138396, 140665, 140736, 141173, 142056, 142777, 143025, 143729, 144484, 146181, 147051, 147322, 147707, 147842, 148080, 149026, 149044, 149389, 150003, 150384, 150454, 150686, 151343, 151961, 152119, 153791, 154328, 154513, 154639, 155049, 155114, 158040, 158895, 191284, 192272, 192698, and 193706;

[0271] a LIPA nucleotide position of SEQ ID NO: 468, or the complement thereof, selected from the group consisting of nucleotide positions 1197, 7820, 28543 and 28746;

[0272] a TNFRSF6 nucleotide position of SEQ ID NO: 403, or the complement thereof, selected from the group consisting of nucleotide positions 1530, 14525, 14714, 19069, 20412, 20552, 23199, 23416, 1926 and 2269; and

[0273] a uPA nucleotide position of SEQ ID NO: 569 or 560, or the complement thereof, selected from the group consisting of 401, 515, 748 and 1752; and of SEQ ID NO: 563, or the complement thereof, consisting of 93 and 714-715;

[0274] wherein the presence of the one or more polymorphisms, individually and/or in combination, is indicative of an increased or decreased likelihood that the treatment will be effective.

[0275] Also provided are methods of screening for an agent that modulates Aβ protein levels which can include a step of:

[0276] (a) combining a candidate agent with a cell and/or animal comprising nucleic acid comprising a uPA, SNCG, IDE, KNSL1, TNFRSF6 or LIPA gene and/or a portion or portions thereof, that encodes a uPA, SNCG, IDE, KNSL1, TNFRSF6 or LIPA protein and comprises one or more polymorphisms of a uPA, SNCG, IDE, KNSL1, TNFRSF6 or LIPA gene, wherein the cell and/or animal produces Aβ protein; and

[0277] (b) determining the effect of the agent upon Aβ protein levels in the animal and/or cell and/or extracellular medium.

[0278] Methods of screening for an agent that modulates the expression and/or activity of a uPA, SNCG, IDE, KNSL1, TNFRSF6 or LIPA protein provided herein can include a step of:

[0279] (a) combining a candidate agent with a cell and/or animal comprising nucleic acid that encodes a uPA, SNCG, IDE, KNSL1, TNFRSF6 or LIPA protein or reporter molecule operatively linked to one or more portions of a uPA, SNCG, IDE, KNSL1, TNFRSF6 or LIPA gene comprising one or more polymorphisms of a uPA, SNCG, IDE, KNSL1, TNFRSF6 or LIPA gene, wherein the one or more polymorphisms occur at nucleotide positions corresponding to nucleotide positions selected from the group consisting of:

[0280] a SNCG nucleotide position of SEQ ID NO: 73, or the complement thereof, selected from the group consisting of nucleotide positions 915, 987, 2533, 3151, 3178, 3189, 3284, 3371, 3779, 4156, 4276, 4311, 4627, 4727, 4813, 5136, 5200 and 5517;

[0281] an IDE nucleotide position of SEQ ID NO: 187, or the complement thereof, selected from the group consisting of nucleotide positions 2456, 3279, 3407, 42943, 62498, 69586, 107395 and 112114; or a nucleotide position of SEQ ID NO: 484, or the complement thereof, selected from the group consisting of nucleotide positions 820, 7066, 11758, 21270, 22225, 29294, 33452, 33708, 36982, 54862, 77786, 80594, 84792, 84997, 86682, 86857, 88511, 90437, 90593, 91650, 91870, 91878, 92011, 93618, 94344, 94714, 95671, 96324, 97302, 97370, 98253, 98276, 98385, 98646, 98814, 99597, 100378, 101029, 101265, 102465, 103289, 103967, 105793, 106076, 106453, 106600, 106995, 107851, 108434, 109096, 109399, 109483, 110870, 111189, 111972, 112627, 112629, 112631, 113407, 114444, 114482, 115473, 116681, 117226, 117600, 117802, 118223, 120011, 122260, 123165, 123424, 124352, 124501, 124692, 125113, 125159, 126568, 127166, 127598, 127600, 127609, 127614, 127623, 127662, 128053, 128261, 128289, 128291, 128393, and 129444;

[0282] a KNSL1 allele spanning a nucleotide position of SEQ ID NO: 348, or the complement thereof, selected from the group consisting of nucleotide positions 300, 1152, 14235, 15104, 20815, 36738-36739, 41015, 42125, 56706, 56887 and 58524; or a nucleotide position of SEQ ID NO: 484, or the complement thereof, selected from the group consisting of nucleotide positions 130876, 131378, 131616, 131620, 131688, 131998, 132004, 132370, 132697, 132968, 133355, 133806, 134030, 134291, 134661, 137087, 137142, 138396, 140665, 140736, 141173, 142056, 142777, 143025, 143729, 144484, 146181, 147051, 147322, 147707, 147842, 148080, 149026, 149044, 149389, 150003, 150384, 150454, 150686, 151343, 151961, 152119, 153791, 154328, 154513, 154639, 155049, 155114, 158040, 158895, 191284, 192272, 192698, and 193706;

[0283] a LIPA nucleotide position of SEQ ID NO: 468, or the complement thereof, selected from the group consisting of nucleotide positions 1197, 7820, 28543 and 28746;

[0284] a TNFRSF6 nucleotide position of SEQ ID NO: 403, or the complement thereof, selected from the group consisting of nucleotide positions 1530, 14525, 14714, 19069, 20412, 20552, 23199, 23416, 1926 and 2269; and

[0285] a uPA nucleotide position of SEQ ID NO: 569 or 560, or the complement thereof, selected from the group consisting of 401, 515, 748 and 1752; and of SEQ ID NO: 563, or the complement thereof, consisting of 93 and 714-715; and

[0286] (b) determining the effect of the agent on the expression and/or activity of uPA, SNCG, IDE, KNSL1, TNFRSF6 or LIPA mRNA, uPA, SNCG, IDE, KNSL1, TNFRSF6 or LIPA protein or the reporter molecule encoded by the nucleic acid in the cell and/or animal.

[0287] Methods of screening for an agent that modulates the expression and/or activity of a uPA, SNCG, IDE, KNSL1, TNFRSF6 or LIPA protein provided herein can include a step of:

[0288] (a) combining a candidate agent with a cell and/or animal comprising nucleic acid comprising a uPA, SNCG, IDE, KNSL1, TNFRSF6 or LIPA gene and/or a portion or portions thereof that encodes a uPA, SNCG, IDE, KNSL1, TNFRSF6 or LIPA protein comprising one or more polymorphisms of a uPA, SNCG, IDE, KNSL1, TNFRSF6 or LIPA gene, wherein the one or more polymorphisms occur at nucleotide positions corresponding to nucleotide positions selected from the group of nucleotide positions of the IDE gene corresponding to nucleotides 2456, 3279, 3407 and 42943 of SEQ ID NO: 187, or the complementary positions thereof; of the KNSL1 gene corresponding to nucleotides 132370, 133355, 147842 and 178981 of SEQ ID NO: 484, or the complementary positions thereof; of the LIPA gene corresponding to nucleotides 1852, 6063 and 7820 of SEQ ID NO: 468; of a uPA gene or cDNA corresponding to nucleotide positions 3169, 3947, and 6532 of SEQ ID NO: 559 or 560; and the complementary positions thereof; and

[0289] (b) determining the effect of the agent upon the expression and/or activity of uPA, SNCG, IDE, KNSL1, TNFRSF6 or LIPA mRNA and/or uPA, SNCG, IDE, KNSL1, TNFRSF6 or LIPA protein encoded by the nucleic acid in the cell and/or animal.

[0290] In methods of screening for an agent that modulates the expression of a uPA, SNCG, IDE, KNSL1, TNFRSF6 or LIPA protein, a step can include:

[0291] (a) combining a candidate agent with a recombinant cell and/or transgenic animal comprising nucleic acid encoding a reporter molecule operatively linked to one or more portions of a uPA, SNCG, IDE, KNSL1, TNFRSF6 or LIPA gene sufficient to promote expression of the reporter molecule and comprising one or more polymorphisms of a uPA, SNCG, IDE, KNSL1, TNFRSF6 or LIPA gene, wherein the one or more polymorphisms occur at nucleotide positions corresponding to nucleotide positions selected from the group consisting of:

[0292] a SNCG nucleotide position of SEQ ID NO: 73, or the complement thereof, selected from the group consisting of nucleotide positions 915, 987, 2533, 3151, 3178, 3189, 3284, 3371, 3779, 4156, 4276, 4311, 4627, 4727, 4813, 5136, 5200 and 5517;

[0293] an IDE nucleotide position of SEQ ID NO: 187, or the complement thereof, selected from the group consisting of nucleotide positions 2456, 3279, 3407, 42943, 62498, 69586, 107395 and 112114; or a nucleotide position of SEQ ID NO: 484, or the complement thereof, selected from the group consisting of nucleotide positions 820, 7066, 11758, 21270, 22225, 29294, 33452, 33708, 36982, 54862, 77786, 80594, 84792, 84997, 86682, 86857, 88511, 90437, 90593, 91650, 91870, 91878, 92011, 93618, 94344, 94714, 95671, 96324, 97302, 97370, 98253, 98276, 98385, 98646, 98814, 99597, 100378, 101029, 101265, 102465, 103289, 103967, 105793, 106076, 106453, 106600, 106995, 107851, 108434, 109096, 109399, 109483, 110870, 111189, 111972, 112627, 112629, 112631, 113407, 114444, 114482, 115473, 116681, 117226, 117600, 117802, 118223, 120011, 122260, 123165, 123424, 124352, 124501, 124692, 125113, 125159, 126568, 127166, 127598, 127600, 127609, 127614, 127623, 127662, 128053, 128261, 128289, 128291, 128393, and 129444;

[0294] a KNSL1 allele spanning a nucleotide position of SEQ ID NO: 348, or the complement thereof, selected from the group consisting of nucleotide positions 300, 1152, 14235, 15104, 20815, 36738-36739, 41015, 42125, 56706, 56887 and 58524; or a nucleotide position of SEQ ID NO: 484, or the complement thereof, selected from the group consisting of nucleotide positions 130876, 131378, 131616, 131620, 131688, 131998, 132004, 132370, 132697, 132968, 133355, 133806, 134030, 134291, 134661, 137087, 137142, 138396, 140665, 140736, 141173, 142056, 142777, 143025, 143729, 144484, 146181, 147051, 147322, 147707, 147842, 148080, 149026, 149044, 149389, 150003, 150384, 150454, 150686, 151343, 151961, 152119, 153791, 154328, 154513, 154639, 155049, 155114, 158040, 158895, 191284, 192272, 192698, and 193706;

[0295] a LIPA nucleotide position of SEQ ID NO: 468, or the complement thereof, selected from the group consisting of nucleotide positions 1197, 7820, 28543 and 28746;

[0296] a TNFRSF6 nucleotide position of SEQ ID NO: 403, or the complement thereof, selected from the group consisting of nucleotide positions 1530, 14525, 14714, 19069, 20412, 20552, 23199, 23416, 1926 and 2269; and

[0297] a uPA nucleotide position of SEQ ID NO: 569 or 560, or the complement thereof, selected from the group consisting of 401, 515, 748 and 1752; and of SEQ ID NO: 563, or the complement thereof, consisting of 93 and 714-715; and

[0298] (b) determining the effect of the agent on the expression and/or activity of the reporter molecule in the cell and/or animal.

[0299] Also provided are methods for confirming a phenotypic diagnosis of Alzheimer's disease in a subject. These methods can include a step of:

[0300] detecting in nucleic acid obtained from a subject diagnosed with Alzheimer's disease the presence or absence of one or more polymorphisms of a uPA, SNCG, IDE, KNSL1, TNFRSF6 or LIPA gene, wherein the presence of the one or more polymorphisms, individually and/or in combination, confirms a phenotypic diagnosis of Alzheimer's disease.

[0301] Methods for determining a level of risk for a uPA, SNCG, IDE, KNSL1, TNFRSF6 or LIPA-mediated disease or disorder in a subject provided herein can include a step of:

[0302] detecting in nucleic acid obtained from the subject the presence or absence of one or more polymorphisms in a uPA, SNCG, IDE, KNSL1, TNFRSF6 or LIPA gene, wherein the one or more polymorphisms occur at nucleotide positions corresponding to nucleotide positions selected from the group consisting of:

[0303] a SNCG nucleotide position of SEQ ID NO: 73, or the complement thereof, selected from the group consisting of nucleotide positions 915, 987, 2533, 3151, 3178, 3189, 3284, 3371, 3779, 4156, 4276, 4311, 4627, 4727, 4813, 5136, 5200 and 5517;

[0304] an IDE nucleotide position of SEQ ID NO: 187, or the complement thereof, selected from the group consisting of nucleotide positions 2456, 3279, 3407, 42943, 62498, 69586, 107395 and 112114; or a nucleotide position of SEQ ID NO: 484, or the complement thereof, selected from the group consisting of nucleotide positions 820, 7066, 11758, 21270, 22225, 29294, 33452, 33708, 36982, 54862, 77786, 80594, 84792, 84997, 86682, 86857, 88511, 90437, 90593, 91650, 91870, 91878, 92011, 93618, 94344, 94714, 95671, 96324, 97302, 97370, 98253, 98276, 98385, 98646, 98814, 99597, 100378, 101029, 101265, 102465, 103289, 103967, 105793, 106076, 106453, 106600, 106995, 107851, 108434, 109096, 109399, 109483, 110870, 111189, 111972, 112627, 112629, 112631, 113407, 114444, 114482, 115473, 116681, 117226, 117600, 117802, 118223, 120011, 122260, 123165, 123424, 124352, 124501, 124692, 125113, 125159, 126568, 127166, 127598, 127600, 127609, 127614, 127623, 127662, 128053, 128261, 128289, 128291, 128393, and 129444;

[0305] a KNSL1 allele spanning a nucleotide position of SEQ ID NO: 348, or the complement thereof, selected from the group consisting of nucleotide positions 300, 1152, 14235, 15104, 20815, 36738-36739, 41015, 42125, 56706, 56887 and 58524; or a nucleotide position of SEQ ID NO: 484, or the complement thereof, selected from the group consisting of nucleotide positions 130876, 131378, 131616, 131620, 131688, 131998, 132004, 132370, 132697, 132968, 133355, 133806, 134030, 134291, 134661, 137087, 137142, 138396, 140665, 140736, 141173, 142056, 142777, 143025, 143729, 144484, 146181, 147051, 147322, 147707, 147842, 148080, 149026, 149044, 149389, 150003, 150384, 150454, 150686, 151343, 151961, 152119, 153791, 154328, 154513, 154639, 155049, 155114, 158040, 158895, 191284, 192272, 192698, and 193706,

[0306] a LIPA nucleotide position of SEQ ID NO: 468, or the complement thereof, selected from the group consisting of nucleotide positions 1197, 7820, 28543 and 28746;

[0307] a TNFRSF6 nucleotide position of SEQ ID NO: 403, or the complement thereof, selected from the group consisting of nucleotide positions 1530, 14525, 14714, 19069, 20412, 20552, 23199, 23416, 1926 and 2269; and

[0308] a uPA nucleotide position of SEQ ID NO: 569 or 560, or the complement thereof, selected from the group consisting of 401, 515, 748 and 1752; and of SEQ ID NO: 563, or the complement thereof, consisting of 93 and 714-715.

### BRIEF DESCRIPTION OF THE DRAWINGS

[0309] FIG. 1 shows a genomic DNA sequence corresponding to GenBank Accession No. AF037207 (SEQ ID NO: 72) containing the SNCG gene therein. Exons are indicated by ˜, and the polymorphic regions set forth in Table 2 are labelled accordingly. Previously identified SNPs are indicated by an “rs” preceding a numerical value.

[0310] FIG. 2 shows a genomic DNA sequence corresponding to the reverse complement of NCBI Accession No. AL356128.15 (SEQ ID NO: 186) containing the IDE gene therein. Exons are indicated by ˜, and the polymorphic regions set forth in Table 4 are labelled accordingly.

[0311] FIG. 3 shows a genomic DNA sequence corresponding to the reverse complement of a 63,834 nucleotide portion (SEQ ID NO: 347) of NCBI Accession No. NT_{—}008769.1 starting at nucleotide 1,669,312 and ending at nucleotide 1,733,136, having the human KNSL1 gene therein. Exons are indicated by ˜, and the polymorphic regions set forth in Table 6 are labelled accordingly. Previously identified SNPs are indicated by an “rs” preceding a numerical value.

[0312] FIG. 4 shows a genomic DNA sequence corresponding to the reverse complement of a 28,118 nucleotide portion (SEQ ID NO: 402) of NCBI Accession No. AL157394.11 starting at nucleotide 17,215 and ending at nucleotide 45,332, having the human TNFRSF6 gene therein. Exons are indicated by ˜, and the polymorphic regions set forth in Table 8 are labelled accordingly.

[0313] FIG. 5 shows a genomic DNA sequence corresponding to the 40,178 nucleotide portion (SEQ ID NO: 467) of NCBI Accession No. NT_{—}008679.5 starting at nucleotide 6,017,146 and ending at 6,057,323, having the human LIPA gene therein. Exons are indicated by ˜, and the polymorphic regions set forth in Table 10 are labelled accordingly. Previously identified SNPs are indicated by an “rs” preceding a numerical value.

[0314] FIG. 6 shows a genomic DNA sequence corresponding to the IDE/KNSL1 genes taken from the human genome hg12 draft build of chromosome 10:93094801 to 93296900 (SEQ ID NO: 484) available from “www.genome.ucsc.edu”. This sequence is also contained in NCBI Contig NT 008769. This sequence (SEQ ID NO: 484) has the complement of the human IDE gene in reverse 3′ to 5′ orientation corresponding to approximately nucleotides 1-130,000; the human KNSL gene in 5′ to 3′ orientation, and the respective intergenic region therein. Exons are indicated by ˜, and the IDE and KNSL polymorphic regions set forth in Tables 4, 4-B and 6, 6-B, respectively, are labelled accordingly. Previously identified SNPs are indicated by an “rs” preceding a numerical value.

[0315] FIG. 7 shows the primers and cycling conditions used for testing the particular IDE and KNSL1 polymorphic regions indicated as set forth in Example 3.

[0316] FIG. 8 shows a genomic DNA sequence corresponding to nucleotides 827 to 9141 of Genbank Accession No. AF377330 (SEQ ID NO: 559) containing a human uPA (PLAU) gene therein. Exons are indicated by ˜, and the polymorphic regions set forth in Table 12 are labelled accordingly. Previously identified polymorphisms set forth in Table F are indicated by an “rs” preceding a numerical value.

[0317] FIG. 9 shows a cDNA sequence corresponding to Genbank Accession No. NM_{—}002658 (SEQ ID NO: 561) encoding a human uPA protein. Polymorphic regions as set forth in Tables 12 and F that are located in this sequence are indicated.

[0318] FIG. 10 shows the reverse complement of the nucleotides 74623356-74624256 on Chromosome 10 (SEQ ID NO: 563) from the Human Genome Draft build hg12 which is available at www.genome.ucsc.edu.

### DETAILED DESCRIPTION OF PREFERRED EMBODIMENTS

[0319] A. Definitions

[0320] Unless defined otherwise, all technical and scientific terms used herein have the same meaning as is commonly understood by one of skill in the art to which the invention(s) belong. All patents, patent applications, published applications and publications, published nucleic acid and amino acid sequences, e.g., NCBI and Genbank sequences, other websites and other published materials referred to throughout the entire disclosure herein, unless noted otherwise, are incorporated by reference in their entirety. Where reference is made to a URL or other such indentifier or address, it understood that such identifiers can change and particular information on the internet can come and go, but equivalent information can be found by searching the internet. Reference thereto evidences the availability and public dissemination of such information. In the event that there are a plurality of definitions for terms herein, those in this section prevail.

[0321] As used herein, sequencing, with reference to nucleic acids, refers to the process of determining a nucleotide sequence and can be performed using any method known to those of skill in the art. For example, if a polymorphism is identified or known, and it is desired to assess its frequency or presence in nucleic acid samples taken from a subject, the region of interest from the samples can be isolated, such as by PCR or restriction fragments, hybridization or other suitable method known to those of skill in the art, and sequenced. For purposes herein, sequencing may be performed using any known method, such as set forth in U.S. Pat. Nos. 5,547,835; 5,622,824; 5,851,765; 5,928,906; 5,503,980; 5,631,134; 5,795,714; 5,525,464; 5,695,940; 5,834,189; 5,869,242; 5,876,934; 5,908,755; 5,912,118; 5,952,174; 5,976,802; 5,981,186; 5,998,143; 6,004,744; 6,017,702; 6,018,041; 6,025,136; 6,046,005; 6,087,095; 6,117,634, 6,013,431, WO/98/30883; WO/98156954; WO/99/09218; WO/00/58519, and the others.

[0322] As used herein, “determining a predisposition for or occurrence of a disease or disorder” means that a subject having a particular genotype and/or haplotype has a higher likelihood or increased risk or a statistically significant higher frequency of occurrence for developing or having a particular disease or disorder than one not having such a genotype and/or haplotype. It is also meant to include subjects that already may have symptoms manifested by the disease and can be used to confirm the diagnosis of the particular disease, along with other factors. This may be especially useful in the differential diagnosis of AD and other diseases and disorders that are characterized by similar symptoms of dementia. A statistically significant higher frequency of occurrence of a disease or condition in an individual carrying an allele, genotype or haplotype is relative to the frequency of occurrence of the disease or condition in a member of the same population not carrying the allele, genotype or haplotype. Those skilled in the art are familiar with various tests used to determine statistical significance.

[0323] As used herein, the term “subject” refers to mammals and in particular human beings.

[0324] As used herein, “target nucleic acid” refers to a nucleic acid molecule which contains all or a portion of a polymorphic region of a nucleic acid segment, for example, a gene or portion thereof, of interest.

[0325] As used herein, “genetic marker” refers to a segment of DNA with an identifiable location on a chromosome. The DNA segment may contain one or more than one nucleotide. The inheritance of a genetic marker may be followed. Typically, genetic markers useful in genetic analyses are polymorphic such that two or more alternative forms or sequences or alleles exist in a population.

[0326] As used herein, “polymorphism” refers to the coexistence of more than one form or allele of a nucleic acid, such as a chromosome, or portion thereof, or a gene or portion thereof. For example, a portion or locus of a gene at which there are at least two different alleles, i.e., two different nucleotide sequences, is referred to as a “polymorphic region of a gene.” A polymorphic region can be a single nucleotide or can be several nucleotides in length. Polymorphism includes substitutions, insertions, duplications and deletions of nucleotides. A polymorphism can also refer to a particular nucleotide(s) or nucleotide sequence occurring at a particular polymorphic site.

[0327] As used herein, “allele”, which is used interchangeably herein with “allelic variant” refers to alternative forms of a nucleic acid such as a gene or polymorphic regions thereof. Alleles occupy the same locus or position (referred to herein as a polymorphic region) on homologous chromosomes. When a subject has two identical alleles of a polymorphic region within a gene, the subject is said to be homozygous for the allele. When a subject has two different alleles of a polymorphic region within a gene, the subject is said to be heterozygous for the allele. Alleles of a specific gene can differ from each other at a polymorphic region corresponding to a single nucleotide, or several nucleotides, and can include substitutions, deletions, insertions and duplications of nucleotides. An allele of a gene can also be a form of a gene containing a mutation.

[0328] As used herein, “genotype” refers to the identity of the alleles present in an individual or sample. The term “genotyping” a sample or individual refers to determining a specific allele or specific nucleotide(s) carried by an individual at particular region(s).

[0329] As used herein, “haplotype” refers to a collection of genetic markers. A haplotype can be a combination of alleles present in an individual or sample. A haplotype can be the alleles of different genes received by an individual from one parent, or the array of polymorphisms on a chromosome or portion thereof.

[0330] As used herein, the term “gene” or “recombinant gene” refers to the segment of DNA involved in producing a functional gene product, including regions preceding (leader) and following (trailer) the region of a gene that contains coding sequences, and may include intervening sequences (introns) between individual coding segments (exons). Because the boundaries between, for example, an upstream, or leader, region of one gene and the upstream (or downstream) region of another gene may not be well-defined, or may overlap, include intergenic sequence and/or be non-existent, the term “gene” when used herein can include nucleotide sequence in the regions surrounding the clearly identified genomic sequence of a gene.

[0331] As used herein, the term “coding sequence” refers to that portion of a gene that encodes an amino acid sequence of a protein.

[0332] As used herein, “indicative of a predisposition to a disease” with reference to a particular polymorphism(s) or allele of one or more polymorphic regions means that an individual who possesses the particular allele(s) is more likely to develop (or has a higher risk of developing) or have the disease, e.g., AD, without detectable symptoms thereof than someone who does not have the particular alleles(s). The allele(s) may be over-represented in frequency in individuals with the disease as compared to individuals who do not have the disease. Thus, the particular allele(s) of one or more polymorphic regions can be used to predict disease even in pre-symptomatic or pre-diseased individuals.

[0333] As used herein, “indicative of the occurrence of a disease” with reference to a particular allele of one or more polymorphic regions means that an individual who possesses the allele(s) and manifests one or more symptoms of a disease, e.g., AD, is more likely to have the disease than someone who does not have the particular allele(s) and either does or does not manifest one or more symptoms of the disease. Thus, the particular allele(s) may be used to diagnose disease, in particular, differentially diagnose AD. This may be especially useful in the differential diagnosis of diseases and disorders that are characterized by similar symptoms. For example, the particular allele(s) of one or more polymorphic regions may be used to distinguish an individual with AD-associated dementia from an individual with dementia resulting from a condition unrelated to AD. This is particularly of use in diagnosis of AD in individuals about age 50 or greater, about age 60 or greater or about age 65 or greater. In methods of using an allele of one or more polymorphic regions to diagnose a disease, e.g., AD, determination of the presence or absence of the allele(s) in an individual may be conducted in conjunction with other diagnostic tests for the disease, including a variety of neuropsychological tests known to those of skill in the art and referred to herein. A statistically significant higher frequency of occurrence of a disease or condition in subjects carrying an allele, genotype or haplotype can be relative to the frequency of occurrence of the disease or condition in a member of the same or matched population not carrying the allele, genotype or haplotype. Those skilled in the art are familiar with various tests used to determine statistical significance.

[0334] As used herein, a “uPA-mediated disease or disorder” refers to a disease or disorder involving a uPA gene, transcript and/or protein. For example, the disease or disorder may be caused, in whole or in part, or exacerbated by uPA protein activity such as enzymatic, proteolytic and/or binding activity. The disease or disorder may involve an aberrant level of uPA gene expression, gene product synthesis and/or aberrant gene product activity relative to levels and/or activities found in normal individuals who are not affected by the disease or disorder. For example, because a uPA-mediated disease or disorder can involve aberrant uPA protein activity and/or uPA protein levels, the disease or disorder may involve proteolysis and/or interactions between uPA and other molecules, e.g., uPAR and PAIs; and alterations therein.

[0335] As used herein, “neurodegenerative disease” refers to diseases or disorders wherein selective neuronal populations are destroyed and include Alzheimer's disease (AD), Parkinsonian syndromes such as Parkinson's disease (PD), Huntington's disease (HD), and Prion diseases.

[0336] As used herein, an “Alzheimer's disease” or “AD” refers to a group of visible, detectable or otherwise measurable properties characteristic of AD. Exemplary properties include, but are not limited to, dementia, aphasia (language problems), apraxia (complex movement problems), agnosia (problems in identifying objects), progressive memory impairment, disordered cognitive function, altered behavior, including paranoia, delusions and loss of social appropriateness, progressive decline in language function, slowing of motor functions such as gait and coordination in later stages of AD, amyloid-containing plaques which are foci of extracellular amyloid-β (Aβ) protein deposition with dystrophic neurites and associated axonal and dendritic injury and microglia expressing surface antigens associated with activation (e.g., CD45 and HLA-DR), diffuse (“preamyloid”) plaques and neuronal cytoplasmic inclusions such as neurofibrillary tangles containing hyperphosphorylated tau protein or Lewy bodies (containing α-synuclein). Standardized clinical criteria for the diagnosis of AD have been established by NINCDS/ADRDA (National Institute of Neurological and Communicative Disorders and Stroke/Alzheimer's Disease and Related Disorders Association) (McKhann et al. (1984) Neurology 34:939-944). The clinical manifestations of AD as set forth in these criteria are included within the definition of AD. For example, dementia may be established by clinical exam and documented by any of several neuropsychological tests, including the Mini Mental State Exam (MMSE) (Folstein and McHugh (1975) J. Psychiatr. Res. 12:196-198; Cockrell and Folstein (1988) Psychopharm. Bull. 24:689-692), the Blessed Test (Blessed et al. (1968) Br. J. Psychiatry 114:797-811), and the Alzheimer's Disease Assessment Scale-Cognitive (ADAS-COG) Test (Rosen et al. (1984) Am. J. Psychiatry 141:1356-1364; Weyer et al. (1997) Int. Psychogeriatr. 9:123-138; and Ihl et al. (2000) Neuropsychobiol. 4:102-107). A particular form of AD contemplated for diagnosis by the methods and compositions provided herein is late-onset Alzheimer's disease.

[0337] As used herein, “late-onset Alzheimer's disease” refers to a type of AD in which AD-associated symptoms manifest at an age of ≧ about 50 years. In late-onset AD, such symptoms may manifest at any age of about 50 years or older and typically may manifest at ≧ about 60 years or ≧ about 65 years.

[0338] As used herein, “detecting,” in the context of detecting the presence or absence of a polymorphism or an allelic variant, refers to any method by which the presence or absence of a particular allelic variant can be determined; e.g., detecting a particular nucleotide at a particular polymorphic region. Exemplary methods include, but are not limited to, sequencing, allele specific hybridization, primer specific extension, oligonucleotide ligation assay, restriction enzyme analysis and single-stranded conformation analysis.

[0339] As used herein, “pedigree” refers to a family for which information concerning the ancestral relationships and transmission of genetic traits over several generations is known.

[0340] As used herein, “linkage disequilibrium” with reference to the relationship between alleles refers to the deviation from the random occurrence of the alleles in a haplotype in populations. Alleles observed together on a chromosome more often than expected from their frequencies in the population may be referred to as in linkage disequilibrium. Alleles that are physically close are more likely to be inherited together than are alleles that are farther apart. Therefore, variations of several markers that are close to, or within, a particular gene variant on a chromosome are likely to be inherited together with that gene variant when they are in linkage disequilibrium. Thus, genetic markers, e.g., microsatellite markers and SNP variations, that are in linkage disequilibrium and associated with a disease phenotype can mark the position on the chromosome in which a susceptibility gene is located.

[0341] Generally, linkage disequilibrium spans chromosome segments ranging in size from about ≦5 kb to about 500 kb or less, such as distances of ≦80 kb or ≦50 kb [Risch (2000) Nature 405:847-856; Abecasis et al. (2001) Am. J. Hum. Genet. 68:191-197; Reich et al. (2001) Nature 41:199-204]. It is common, however, to find some degree of linkage disequilibrium between alleles that are up to about 1-2 cM apart. Significant linkage disequilibrium between microsatellite loci has been reported to extend to ≧4 cM [Huttley et al. (1999) Genetics 152:1711-1722] and as great as ≦˜21 cM [Wilson and Goldstein (2000) Am. J. Hum. Genet. 67:926-935]. The degree of linkage disequilibrium between two alleles can vary based on location within the genome, population distribution, population frequency and demographic history [Reich et al. (2001) Nature 41:199-204; Stephens et al. (2001) Science 293:489-493; Wilson and Goldstein (2000) Am. J. Hum. Genet. 67:926-935].

[0342] When a disease-causing allele is in linkage disequilibrium with another allele, the frequency of the other allele will; be increased in a disease population as compared to a trait-negative population. This increased frequency is referred to as “genetic association” or “allelic association” between the other allele and the disease. Thus, association between a disease trait and a marker allele can be indicative of linkage disequilibrium between the disease-causing allele and the marker allele. Similarly, when an allele that confers protection against a disease is in linkage disequilibrium with another allele, the frequency of the other allele may be increased in a trait-negative population relative to a disease population. This increased frequency is referred to as genetic association between the other allele and the protective allele.

[0343] Studies of genetic association are commonly used to identify genes involved in complex traits. Genetic association studies assess correlations between genetic variants and trait differences on a population scale. In association-based methods of mapping genes that increase susceptibility to disease, evidence is sought for a statistically significant association between an allele and a trait or trait-causing allele. The occurrence of a disease-causing allele may be presumed by the occurrence of the disease trait. In such studies, it may turn out that a significant association is obtained between an allele and a trait-negative population. Such an association may be indicative of linkage disequilibrium between that allele and a protective allele that decreases susceptibility to disease. Association studies focus on population frequencies and explore the relationships among frequencies for sets of alleles between loci. Association may be determined using a number of analytical methods, including but not limited to case-control studies, family-based association techniques and haplotype analyses. Association determinations utilizing alleles that are not transmitted from parents to affected individuals as controls and/or related disease family members (e.g., sib pairs) as affected individuals are particularly useful in accurate determination of association. Such determinations are in contrast to association studies using unrelated populations of subjects and matched controls (e.g., case-control studies), which have the advantage of being relatively simple in terms of the sample sets and statistical analyses involved but may be more susceptible to false positive (type I) and false negative (type II) errors. Thus, in case-control studies, it is possible in some instances (e.g., population stratification, insufficient sample size and/or poorly matched control groups) to observe association in the absence of linkage disequilibrium.

[0344] The terms “recombination fraction” and “recombination frequency” are used herein interchangeably and refer to the probability of a recombination event between two loci in a genome.

[0345] As used herein, “linked” refers to a relationship between two loci in a genome. For example, it may refer to the relationship between a polymorphic or marker site on a chromosome and a gene, such as, for example, a gene associated with a disease, such as, for example AD. The relationship may be defined in a number of ways. For example, the relationship may be defined in terms of the extent to which recombination between the loci occurs. Typically, the transmission of alleles located on different chromosomes occurs in a random fashion through independent assortment. Loci representative of two such alleles are considered to be unlinked. If two loci are situated on the same chromosome, the transmission of alleles of one locus may be affected by the presence of the other locus such that the ratios of alleles are no longer independent, and the loci are referred to as “linked.” Two loci are completely linked when there is no recombination between them; the same alleles or phenotypes are always transmitted together from generation to generation within a family. An intermediate state of linkage, referred to as “incomplete linkage” occurs when the transmission of alleles of two loci deviates consistently and measurably from independent assortment but a consistent recombination fraction nonetheless exists for the loci.

[0346] Linkage is commonly assessed by the LOD (logarithm of an odds ratio) score method or other acceptable statistical linkage determination. Positive LOD scores can be considered as evidence of linkage between two loci. The greater the LOD score, the greater the possibility that the loci are linked. LOD scores ≧21 are particularly indicative of linkage. Classification of linkage has been proposed [see, e.g., Lander and Kruglyak (1995) Nature Genet. 11:241-247] based on the number of times it would be expected to see a result at random in a dense, complete genome scan for linkage. Under such a classification scheme, suggestive linkage is statistical evidence that would be expected to occur one time at random in a genome scan, significant linkage is statistical evidence expected to occur 0.05 times in a genome scan (that is with probability 5%), highly significant linkage is statistical evidence expected to occur 0.001 times in a genome scan and confirmed linkage is significant linkage from one or a combination of initial studies that has subsequently been confirmed in a further sample. In the case of sibling pair-based linkage analysis, for example, suggestive, significant and highly significant linkage may correspond to LOD scores of 2.2, 3.6, and 5.4, respectively.

[0347] The relationship between two linked loci may also be defined in terms of the physical or genetic distance between the loci. Thus, two loci may be referred to as linked when they are located relatively close together on the same chromosome. For example, in the case of a polymorphic or marker site on a chromosome linked with a DNA segment associated with a disease or disorder, the marker may be located a particular number of base pairs (bp) or centiMorgans (cM) from the DNA segment. The particular distance, in bp or cM, between two linked loci can vary, but is small enough so that the linkage score, e.g., the LOD score, obtained in linkage analysis of the two loci (e.g., a marker and a trait such as a disease) is at least indicative of linkage (i.e., the loci are “relatively close” to each other) if not at least suggestive, significant or even highly significant linkage. A linked marker may be within the DNA segment associated with a trait (e.g., AD) and, further, may be a causative polymorphism in a disease ( e.g., AD) gene, such as, for example, a polymorphism in a disease gene that is responsible for a defect in the disease gene. When the marker is located within a disease gene, it is referred to as coincident with the gene.

[0348] As used herein, a “disease or disorder DNA segment” is a gene or other DNA segment that either directly causes a disease or disorder or confers an increased or decreased susceptibility to a disease or disorder. Thus, for example, an Alzheimer's disease (AD) DNA segment is a gene or other DNA segment that either directly causes AD or confers an increased or decreased susceptibility to AD. A gene or DNA segment which causes a disease or disorder may, for example, have an allele that contains an alteration, e.g., a mutation, relative to another allele(s) of the gene or DNA segment, wherein the alteration can cause or give rise to a defect involved in the manifestation of a disease or disorder phenotype.

[0349] A gene or DNA segment that confers increased susceptibility to a disease or disorder may have an allele that predisposes an individual to the disease or disorder but is not an invariant cause of the disease or disorder. Thus, an allele that confers increased susceptibility to disease or disorder can increase the likelihood of developing the disease or disorder but is not sufficient alone to cause the disease or disorder. Such an allele may be referred-to as a genetic risk ractor for the disease or disorder and may be one of several genetic risk factors, which in turn may be one type of several types of risk factors. For example, other possible risk factors could include environmental risk factors. An allele of a gene or DNA segment that confers increased susceptibility to a disease or disorder can be over-represented in cases in case control studies and/or can be associated with affected individuals in a family-based association analysis.

[0350] A gene or DNA segment that confers decreased susceptibility to a disease or disorder can be under-represented in cases in case control studies and/or can be associated with unaffected individuals in a family-based association analysis.

[0351] As used herein, a “DNA segment associated with a disease or disorder” refers to an allele that either is a disease or disorder gene or DNA segment or is in linkage disequilibrium with a disease or disorder gene or DNA segment. For example, an allele that is a disease or disorder risk factor or disease or disorder susceptibility locus may be in linkage disequilibrium with an allele of a disease gene or DNA segment and thus may be a DNA segment associated with a disease or disorder. In another example, a DNA segment associated with a disease or disorder may be in linkage disequilibrium with a protective allele of a disease gene that confers a decreased susceptibility to a disease or disorder. DNA segments associated with a disease or disorder include genes as well as intergenic regions of DNA.

[0352] As used herein, the term “protective” with reference to an allele refers to an allele that is indicative of a decreased risk relative to the general population for a genetic disease, e.g., AD. The decreased risk associated with a protective allele may be identified as under-representation of the allele in cases relative to controls, and/or as a significant association between the allele and unaffected members of a family that contains affected members. A protective allele may be a variant of a DNA segment, such as a gene, that has a risk factor or disease allele. A protective allele may be a variant that is “functional” in that it participates in counteracting a defect that occurs in a genetic disease, e.g., AD, or may confer apparent “protection” against a disease by not conferring risk for the disease.

[0353] As used herein, the term “penetrance” refers to the ratio between the number of trait positive carriers of a particular allele and the total number of carriers of the allele in the population. Thus, a highly penetrant gene or allele will have a greater penetrance ratio than a weakly or moderately penetrant gene. Penetrance may also be considered as the percent probability that a carrier of a particular allele will express the corresponding phenotype.

[0354] As used herein, “prevalence” refers to the percentage of trait positive individuals that carry a particular allele.

[0355] As used herein, the term “effect size” with reference to a disease gene refers to the degree to which mutations or polymorphisms in a DNA segment, e.g., a gene, confer susceptibility to the disease taking into account the magnitude of prevalence and penetrance of the polymorphism.

[0356] As used herein, a sequence of nucleotides encoding a uPA protein refers to any sequence of nucleotides that encodes a protein that has a biological activity or functional activity of uPA, such as protease activity. Such sequence of nucleotides can be cDNA or can include introns. In addition, uPA genes, which include a promoter region and optionally additional regulatory regions, are provided.

[0357] As used herein, a portion of a uPA gene refers to any segment of a uPA gene that, alone or in combination with one or more other segments of a uPA gene, provides for and/or influence a function of the gene and can be determined empirically. For example, a protein coding segment of a uPA gene functions to yield a mRNA that encodes the amino acid sequence of a uPA protein. Untranslated sequence regions (UTRs), 5′ and 3′ UTRs, can function to regulate gene transcription, e.g., patterns and levels of transcription [see, e.g., Smicun et al. (1998) Eur. J. Biochem. 251:704-7151. Segments in gene promoters can also function to initiate and regulate transcription, e.g., polymerase binding sites. Segments in other regions of a gene, for example, sequences upstream of promoter elements, can also regulate transcription, such as enhancer, repressor and silencer elements. Introns can also contain elements that can influence gene function, such as transcript generation and splicing.

[0358] As used herein, the phrase “altered level of risk” refers to either a predisposition for the neurodegenerative disease or to protection from the neurodegenerative disease. As used herein “protection from neurodegenerative disease” or grammatical variations thereof, such as “protection against”, refers to a particular subject having a decreased risk of developing a neurodegenerative disease, such as AD, compared to a subject not having the particular allelic variant(s) which confess protection.

[0359] As used herein, “SNCG” refers to the human γ-synuclein gene (a.k.a. persyn and breast cancer-specific gene 1 or BCSG1) set forth herein in FIG. 1 and in SEQ ID NO: 72.

[0360] As used herein, “IDE” refers to the human Insulin Degrading Enzyme gene set forth herein in FIG. 2 and in SEQ ID NO: 186.

[0361] As used herein, “KNSL” refers to the human Kinesin I-like gene set forth herein in FIG. 3 and in SEQ ID NO: 347.

[0362] As used herein, “TNFRSF6” refers to the tumor necrosis factor receptor superfamily member 6 gene set forth herein in FIG. 4 and in SEQ ID NO: 402.

[0363] As used herein, “LIPA” refers to the lysosomal acid lipase (a.k.a. acid cholesteryl ester hydrolase and cholesterol ester hydrolase) gene set forth herein in FIG. 5 and in SEQ ID NO: 467.

[0364] As used herein, “association” with reference to the relationship between alleles and a trait or trait-causing allele refers to the deviation from the random occurrence of the allele and a trait or trait-causing allele in a haplotype in populations. An allele and a trait or trait-causing allele observed together on a chromosome more often than, expected from their frequencies in the population may be referred to as associated.

[0365] In association-based methods, evidence is sought for a statistically significant association between an allele and a trait or trait-causing allele. For example, the occurrence of a disease-causing allele may be presumed by the occurrence of the disease trait. Association studies focus on population frequencies and explore the relationships among frequencies for sets of alleles and traits or trait-causing alleles. Association may be determined using a number of analytical methods, including but not limited to case-control studies, family-based association tests and haplotype analyses. Association determinations employing, typically, unaffected family members as controls and/or related disease family members (e.g., sib pairs) as affected individuals are particularly useful in accurate determination of association. Such determinations are in contrast to association studies using unrelated populations of subjects and matched controls (e.g., case-control studies), which have the advantage of being relatively simple in terms of the sample sets and statistical analyses involved but may be more susceptible to false positive (type I) and false negative (type II) errors.

[0366] As used herein, “at a nucleotide position corresponding to” refers to a position of interest (i.e., base number) in a nucleic acid molecule relative to the position in another reference nucleic acid molecule. Corresponding positions can be determined by comparing and aligning sequences to maximize the number of matching nucleotides, for example, such that identity between the sequences is greater than 95%, greater than 96%, greater than 97%, greater than 98% or greater than 99%. The position of interest is then given the number assigned in the reference nucleic acid molecule. For example, if a particular polymorphism in a gene occurs at nucleotide n of SEQ. ID. NO: X. To identify the corresponding nucleotide in another allele or isolate, the sequences are aligned and then the position that lines up with nucleotide n of SEQ. ID. NO: X is identified. Since various alleles may be of different length, the position designated may not actually be the nth nucleotide, but instead is at a position that “corresponds” to the position in the reference sequence.

[0367] As used herein, a nucleotide sequence that is complementary to the nucleotide sequence set forth in SEQ ID NO: X, refers to the nucleotide sequence of the complementary strand of a nucleic acid strand having SEQ ID NO: X. The term “complementary strand” is used herein interchangeably with the term “complement”. The complement of a nucleic acid strand can be the complement of a coding strand or the complement of a non-coding strand. When referring to double stranded nucleic acids, the complement of a nucleic acid having SEQ ID NO: X refers to the complementary strand of the strand having SEQ ID NO: X or to any nucleic acid having the nucleotide sequence of the complementary strand of SEQ ID NO: X. When referring to a single stranded nucleic acid having the nucleotide sequence SEQ ID NO: X, the complement of this nucleic acid is a nucleic acid having a nucleotide sequence which is complementary to that of SEQ ID NO: X.

[0368] As used herein, “APOE4” refers to the apolipoprotein E type 4 allele found to associate with and be a risk factor for AD. The APOE-4 allele consists of a single base change polymorphism (T to C) at nucleotide position 3932 (GenBank Accession No. M10065) which results in a cysteine to arginine substitution at residue 112 of the protein.

[0369] As used herein “nucleic acid” refers to polynucleotides such as deoxyribonucleic acid (DNA) and ribonucleic acid (RNA). The term should also be understood to include, as equivalents, derivatives, variants and analogs of either RNA or DNA made from nucleotide analogs, single-stranded (sense or antisense) and double-stranded polynucleotides. Deoxyribonucleotides include deoxyadenosine, deoxycytidine, deoxyguanosine and deoxythymidine. For RNA, the uracil base is uridine.

[0370] As used herein, “isolated” with reference to a nucleic acid molecule means that the nucleic acid has been separated from the genetic environment from which the nucleic acid was obtained. It may also mean altered from the natural state. For example, a polynucleotide naturally present in a living animal is not “isolated,” but the same polynucleotide separated from the coexisting materials of its natural state is “isolated”, as the term is employed herein. Thus, a polynucleotide produced and/or contained within a recombinant host cell is considered isolated. Also intended as an “isolated polynucleotide” are polynucleotides that have been purified, partially or substantially, from a recombinant host cell or from a native source. The terms isolated and purified are sometimes used interchangeably.

[0371] Thus, “isolated” with reference to a nucleic acid is also meant to include nucleic acid that is free of the coding sequences of those genes that, in the naturally-occurring genome of the organism (if any) immediately flank the gene encoding the nucleic acid of interest. Isolated DNA may be single-stranded or double-stranded, and may be genomic DNA, cDNA, recombinant hybrid DNA, or synthetic DNA. It may be identical to a native DNA sequence, or may differ from such sequence by the deletion, addition, or substitution of one or more nucleotides.

[0372] As used herein, the term “vector” refers to a nucleic acid molecule capable of transporting another nucleic acid to which it has been linked. One type of vector contemplated herein is an episome, i.e., a nucleic acid capable of extra-chromosomal replication. Vectors capable of autonomous replication and/or expression of nucleic acids to which they are linked are thus included within the term “vector.” Vectors capable of directing the expression of genes to which they are operatively linked are also referred to herein as “expression vectors.” Expression vectors commonly used in recombinant DNA techniques are often in the form of “plasmids” which refer generally to circular double-stranded DNA loops which, in their vector form, are not bound to the chromosome. “Plasmid” and “vector” are often used interchangeably as the plasmid is the most commonly used form of vector. Other vectors contemplated for use herein include other forms of expression vectors that serve equivalent functions and that become known in the art subsequently hereto.

[0373] As used herein, “cell” refers to a host cell that has been transformed or transfected with a vector containing one of the nucleic acid molecules described herein. Cells include both prokaryotic and eukaryotic cells including but not limited to human, plant and yeast.

[0374] As used herein, “primer” and “probe” refer to a nucleic acid molecule including DNA, RNA and analogs thereof, including protein nucleic acids (PNA), and mixtures thereof. Such molecules are typically of a length such that they are statistically unique (i.e., occur only once) in the genome of interest. Generally, for a probe or primer to be unique in the human genome, it should contain at least about 14, 16 or 18 contiguous nucleotides of a sequence complementary to or identical to a gene of interest. The probes and primers and primers provided herein can be 10, 20, 30, 50, 100 or more nucleic acids long, but not the entire length of the gene or cDNA sequence.

[0375] As used herein, “antisense nucleic acid molecule” refers to a molecule encoding a sequence complementary to at least a portion of a target nucleic acid molecule, for example RNA or DNA. The sequence is sufficiently complementary to be able to hybridize with the target nucleic acid, preferably under moderate or high stringency conditions to form a stable duplex. The ability to hybridize depends on the degree of complementarity and the length of the antisense nucleic acid. Generally, the longer the hybridizing nucleic acid, the more base mismatches with an RNA it can contain and still form a stable duplex. One skilled in the art can ascertain a tolerable degree of mismatch by use of standard procedures to determine the melting point of the hybridized complex.

[0376] As used herein, “specifically hybridizes” refers to hybridization of a probe or primer or antisense nucleic acid only to a target sequence. Those of skill in the art are familiar with parameters that affect hybridization; such as temperature, nucleic acid (probe, primer or antisense molecule) length and composition, buffer composition and salt concentration and can readily adjust these parameters to achieve specific hybridization of a nucleic acid to a target sequence. Stringency conditions include washing conditions for removing the non-specific nucleic acid and conditions that are equivalent to either high, medium, or low stringency as described below:

[0377] 1) high stringency: 0.1×SSPE, 0.1% SDS, 65° C.

[0378] 2) medium stringency: 0.2×SSPE, 0.1% SDS, 50° C.

[0379] 3) low stringency: 1.0×SSPE, 0.1% SDS, 50° C.

[0380] It is understood that equivalent stringencies may be achieved using alternative buffers, salts and temperatures.

[0381] As used herein, “adjacent” refers to a position 5′ or 3′ to the site of a polymorphism such that there could be nucleotides between that position and the site of the polymorphism. The term “adjacent” includes “immediately adjacent” which refers to a position 5′ or 3′ to the site of a polymorphism, such that there are no nucleotides between that position and the site of the polymorphism.

[0382] As used herein, “drug used to treat Alzheimer's disease” means that the drug reduces the likelihood of the disease, delays the onset of the disease, lessens the symptoms, halts or delays progression of the disease.

[0383] As used herein, “drug used to treat a neurodegenerative disease” means that the drug reduces the likelihood of the disease, delays the onset of the disease, lessens the symptoms, halts or delays progression of the disease.

[0384] As used herein, “response” refers to the effect of a drug on a disease or disorder of a subject. A positive response indicates that the drug reduces the likelihood of the disease, delays the onset of the disease, lessens the symptoms, halts or delays progression of the disease. A negative response indicates that there is no therapeutic or a subtherapeutic reduction in the likelihood of the disease, delay in the onset of the disease, lessening of the symptoms, halting or delay of the progression of the disease.

[0385] As used herein, “combination” refers to any association between or among two or more items. The combination can be two or more separate items, such as two compositions or two collections, can be a mixture thereof, such as a single mixture of the two or more items, or any variation thereof. Thus, for example, a combination may be a collection of nucleic acids, such as probes or primers or genetic markers.

[0386] As used herein, “kit” refers to a package that contains a combination, such as one or more primers or probes used to amplify or detect an allelic variant of one or more polymorphic regions of one or more of the uPA, SNCG, IDE, KNSL1, LIPA and/or TNFRSF6 genes, optionally including instructions and/or reagents for their use.

[0387] As used herein, “solid support” refers to a support substrate or matrix, such as silica, polymeric materials or glass. At least one surface of the support can be partially planar. Regions of the support may be physically separated, for example with trenches, grooves, wells or the like. Some examples of solid supports include slides and beads. Supports are of such composition so as to allow for the immobilization or attachment of nucleic acids and other molecules such that these molecules retain their binding ability.

[0388] As used herein, “array” refers to a collection of elements, such as nucleic acids, containing three or more members. An addressable array is one in which the members of the array are identifiable, typically by position on a solid support. Hence, in general the members of the array will be immobilized to discrete identifiable loci on the surface of a solid phase.

[0389] As used herein, “heterologous” and “foreign” are used interchangeably with respect to nucleic acid and refer to any nucleic acid, including DNA and RNA, that does not occur naturally as part of the genome in which it is present or which is found in a location or locations or amount in the genome that differ from that in which it occurs in nature or which is the result of genetic manipulation of an endogenous genome which alters the endogenous genome. Thus, heterologous or foreign nucleic acid includes any nucleic acid that is not normally found in the host genome in an identical context. It includes nucleic acid that is not endogenous to the cell and has been exogenously introduced into the cell. Examples of heterologous DNA include, but are not limited to, DNA that encodes a gene product or gene product(s) of interest, introduced for purposes of modification of the endogenous genes or for production of an encoded protein. For example, a heterologous or foreign gene may be isolated from a different species than that of the host genome, or alternatively, may be isolated from the host genome but operably linked to one or more regulatory regions which differ from those found in the unaltered, native gene. Other examples of heterologous DNA include, but are not limited to, DNA that encodes traceable marker proteins. Any nucleic acid that one of skill in the art would recognize or consider as heterologous or foreign to the cell in which it may naturally occur is herein encompassed by heterologous nucleic acid.

[0390] As used herein, “recombinant” with reference to a cell refers to a cell in which the endogenous genome has been altered from its original state by genetic manipulation of the endogenous genome. For example, a recombinant cell may be produced by introduction of exogenous nucleic acid into the cell which may integrate into the endogenous DNA or co-exist with the endogenous DNA episomally. A recombinant cell may also be one with a genome that is altered relative to the host cell used in generating the recombinant cell which may be produced, for example, by integration of exogenous nucleic acid into a host cell genome followed by subsequent elimination of all or part of the exogenous nucleic acid thereby resulting in an alteration in the genome of the host cell.

[0391] As used herein, “transgenic animal” refers to any animal, such as a non-human animal, e.g., a mammal, bird or an amphibian, in which one or more of the cells of the animal contain heterologous nucleic acid introduced by way of human intervention, such as by transgenic techniques well known in the art. The nucleic acid is introduced into the cell, directly or indirectly by introduction into a precursor of the cell, by way of deliberate genetic manipulation, such as by microinjection or by infection with a recombinant virus. The term genetic manipulation does not include classical cross-breeding, or in vitro fertilization, but rather is directed to the introduction of a recombinant DNA molecule. This molecule may be stably integrated within a chromosome, i.e., replicate as part of the chromosome, or it may be extrachromosomally replicating DNA. In the typical transgenic animals, the transgene causes cells to express a recombinant form of a protein. However, transgenic animals in which the recombinant gene is silent are also contemplated, as for example, using the FLP or CRE recombinase dependent constructs. Moreover, “transgenic animal” also includes those recombinant animals in which gene disruption of one or more genes is caused by human intervention, including recombination and antisense techniques. “Transgenic animals” also include animals expressing one or more transgenes that encode for wild-type protein, but contain altered noncoding regions; e.g., promoter, introns, 5′-untranslated region and 3′-untranslated region.

[0392] As used herein, an “agent” or “molecule” that “modulates the expression or activity” of a protein refers to any drug, small molecule, nucleic acid (sense or antisense), ribozyme, protein, peptide, lipid, carbohydrate, and the like, or combination thereof, that directly or indirectly changes, alters, abolishes, increases or decreases the expression and/or activity of the protein by affecting nucleic acid encoding the protein or the protein itself. For example, the activity of a uPA protein includes proteolytic activity characteristic of a serine protease, e.g., including the ability to activate plasminogen to form plasmin, and interaction of uPA with other molecules, e.g., uPAR and PAIs.

[0393] As used herein, “an agent that modulates a biological event characteristic of a disease” refers to any drug, small molecule, nucleic acid (sense and antisense), ribozyme, protein, peptide, lipid, carbohydrate etc., or combination thereof, that directly or indirectly changes, alters, abolishes, increases or decreases a structural, molecular, or physiological event connected with the disease, e.g., AD, particularly an event that is readily assessable in an animal model. For example, with respect to AD, such events include, but are not limited to, amyloid deposition, neuropathological developments, learning and memory deficits and other AD-related characteristics (also see properties or characteristics of AD listed hereinabove.

[0394] As used herein, “combining” refers to contacting the candidate agent or biologically active agent with a cell or animal. The agent may be introduced into the cell or animal as a result of the combining. For example, combining a candidate agent with a cell may result in an agent traversing the plasma membrane. For an animal, combining may involve any of the standard routes of administration of an agent, e.g., oral, rectal, transmucosal, intestinal, intravenous, intraperitoneal, intraventricular, subcutaneous, intramuscular, etc., can be used.

[0395] As used herein, “transcription control region” refers to a region of a gene that controls transcription of a segment of the gene to which it is operatively linked. A transcription control region can contain specific sequences of DNA that are sufficient for RNA polymerase recognition, binding and transcription initiation. These sequences are typically referred to as promoter or core promoter sequences. Promoters, depending upon the nature of the regulation, may be constitutive or regulated. A transcription control region also refers regions that include sequences that modulate or regulate transcription, including RNA polymerase recognition and binding and transcription initiation. These sequences may be cis acting or may be responsive to trans acting factors. Included among such sequences are enhancer and silencer sequences which serve as specific sites for gene regulatory proteins. For example, such sequences can be found in the 5′ and 3′ untranslated regions (UTR) of genes. Transcription control region sequences that regulate transciption can be located thousands of bases away from an RNA polymerase binding site or transcription initiation site.

[0396] As used herein, the phrase “operatively linked” generally means the sequences or segments have been covalently joined into one piece of DNA, whether in single or double stranded form, whereby control or regulatory sequences on one segment control or permit expression or replication or other such control of other segments. The two segments are not necessarily contiguous. For gene expression, a DNA sequence and the regulatory sequence(s) are connected in such a way to control or permit gene expression when the appropriate molecules, e.g., transcriptional activator proteins, are bound to the regulatory sequence(s).

[0397] As used herein, “biologically active agents that modulate the expression or activity” of uPA, SNCG, IDE, KNSL, LIPA, or TNFRSF6 refers to any drug, small molecule, nucleic acid (sense or antisense), ribozyme, protein, peptide, lipid, carbohydrate, and the like, or combination thereof, that directly or indirectly changes, alters, abolishes, increases or decreases the expression of the uPA, SNCG, IDE, KNSL, LIPA, or TNFRSF6 protein by affecting nucleic acid encoding the protein or the protein itself, or directly or indirectly changes, alters, abolishes, increases or decreases an activity associated with the protein (see section on pages 123-124).

[0398] As used herein, the term “sense strand” refers to that strand of a double-stranded nucleic acid molecule associated with a gene that has the sequence of the mRNA that encodes the amino acid sequence encoded by the double-stranded nucleic acid molecule. Thus, the sense strand is the non-template strand of a double-stranded DNA molecule associated with a gene.

[0399] As used herein, the term “antisense strand” refers to that strand of a double-stranded nucleic acid molecule associated with a gene that has the complement of the sequence of the mRNA that encodes the amino acid sequence encoded by the double-stranded nucleic acid molecule. Thus, the antisense strand is the strand that contains the template for RNA synthesis.

[0400] B. Polymorphisms in Chromosome 10

[0401] The occurrence of variant forms of a particular nucleic acid sequence, e.g., a gene, is referred to as polymorphism. A region of a DNA segment in which variation occurs may be referred to as a polymorphic region or site. Provided herein are polymorphisms in chromosome 10, and, in particular, human chromosome 10. In particular embodiments, the polymorphisms are located on chromosome 10q, such as on chromosome 10q22, 10q23, 10q24, or 10q25. The polymorphic regions include, but are not limited to, regions of chromosome 10 surrounding and including genes such as SNCG, IDE, KNSL1, LIPA, TNFRSF6 and PLAU. Thus, the polymorphisms provided herein include polymorphisms in exons, introns or intervening sequences, intergenic regions and gene upstream and downstream regions, such as, for example, gene expression regulatory regions.

[0402] 1. Polymorphisms

[0403] A polymorphic region can be a single nucleotide (e.g., single nucleotide polymorphism or SNP), the identity of which differs, e.g., in different alleles, or can be two or more nucleotides in length. For example, variant forms of a DNA sequence may differ by an insertion or deletion of one or more nucleotides, insertion of a sequence that was duplicated, inversion of a sequence or conversion of a single nucleotide to a different nucleotide. Each individual can carry two different forms of the specific sequence or two identical forms of the sequence. More than two forms of a polymorphism may exist for a specific DNA marker in the population, but in one family just four forms are possible: two from each parent. Each child inherits one form of the polymorphism from each parent. Thus, the origin of each chromosome can be traced (maternal or paternal origin).

[0404] Certain polymorphisms may directly cause disease. For example, it is possible that any polymorphism, such as the uPA, SNCG, IDE, KNSL1, TNFRSF6 and LIPA polymorphisms disclosed herein, located within the primary RNA transcript may affect the processing of that transcript into a mature mRNA. For example, it has been shown that single nucleotide changes can disrupt the function of splicing enhancers located within coding sequences (Liu et al., 2001, Nat. Genetics, January:27(1):55-8). Enhancers can be disrupted by single nonsense, missense or translationally silent point mutations. Although less well understood, SNPs that function as exon splicing silencers also have been described (Fairbrother et al., 2000, Mol. Cell Biol., September;20(18):6816-25). Single nucleotide changes within exon splicing silencers could also alter splicing patterns of primary RNA transcripts. Point mutations in either enhancer or silencer sequences could lead to disease by changing the structure of the normal mRNA transcript via the deletion or inclusion of sequences not normally present. Such mutations would effectively alter the levels of the normal protein found within the cell and may even produce a protein with a new and possibly detrimental function.

[0405] Differences between polymorphic forms of a specific DNA sequence may be detected in a variety of ways. For example, if the polymorphism is such that it creates or deletes a restriction enzyme site, such differences may be traced by using restriction enzymes that recognize specific DNA sequences. Restriction enzymes cut (digest) DNA at sites in their specific recognized sequence, resulting in a collection of fragments of the DNA. When a change exists in a DNA sequence that alters a sequence recognized by a restriction enzyme to one not recognized, the fragments of DNA produced by restriction enzyme digestion of the region will be of different sizes. The various possible fragment sizes from a given region therefore depend on the precise sequence of DNA in the region. Variation in the fragments produced is termed “restriction fragment length polymorphism” (RFLP). The different sized-fragments reflecting variant DNA sequences can be visualized by separating the digested DNA according to its size on an agarose gel and visualizing the individual fragments by annealing to a labeled, e.g., radioactively or otherwise labeled, DNA “probe”. RFLPs occur on average every 10 kb.

[0406] RFLPs may be somewhat limiting in genetic analyses in that they usually give only two alleles at a locus and not all parents are heterozygous for these alleles and thus informative for linkage [see, e.g., Botstein et al. (1980) Am. J. Hum. Genet. 32:314-331]. Newer analytic methods take advantage of the presence of DNA sequences that are repeated in tandem, for a variable number of repeats, and that are scattered throughout the human genome. The first of these described were variable number tandem repeats of core sequences (VNTRs) [Jeffreys et al. (1985) Nature 314:67-73; Nakamura et al. (1987) Science 235:1616-1622; Weber (1989) Am. J. Hum. Genet. 44:388-396]. VNTRs may be detected using unique sequences of DNA adjacent to the tandem repeat as marker probes, and digesting the DNA with restriction enzymes that do not recognize sites within the core sequence. VNTRs may also be detected using nucleic acid amplification methods. Highly informative VNTR loci have not been found on all chromosome arms, and those which have been identified are often situated near telomeres [Royle et al. (1998) Genomics 3:352-360], leaving regions of the genome out of reach of these multiallelic marker loci.

[0407] Eukaryotic DNA has tandem repeats of very short simple sequences termed SSRs (simple sequence repeat polymorphisms) such as, for example, (dC-dA)ₙ or (dG-dT)ₙ where n=10-60 (termed GT repeat). These are also referred to as short tandem repeat polymorphisms (STRPs) and microsatellite markers. The (dG-dT) repeats occur every 30-60 kb along the genome [Weber et al. (1989) Am. J. Hum. Genet. 44:388-396; Litt et al. (1989) Am. J. Hum. Genet. 44:397-401], and Alu 3′ (A)n repeats occur approximately every 5 kb [Economou (1990) Proc. Natl. Acad. Sci. U.S.A. 87:2951-4]. Repeat polymorphisms include dinucleotide, trinucleotide and tetranucleotide repeats. Dinucleotide repeats are informative and fairly prevalent in the genome. The small size of the repeat brings about diversity of its allele sizes and thus there is a greater chance that any one person will be heterozygous for the marker. Trinucleotide and tetranucleotide repeats are repeats of three and four nucleotides.

[0408] Oligonucleotides corresponding to flanking regions of these repeats may be used as primers for the polymerase chain reaction (PCR) [Saiki (1988) Science 239:484-491] on a small sample of DNA. By amplifying the DNA with labeled, e.g., radioactive or fluorescent, nucleotides, the sample may be quickly resolved on a sequencing gel and visualized by known methods, e.g., autoradiography or fluorescence detection. Because these polymorphisms are comprised of alleles that may differ in length by only a few base pairs, they generally are not detectable by conventional Southern blotting as used in traditional RFLP analysis. The use of PCR to characterize SSRs such as GT polymorphic markers enables the use of less DNA, typically only ten nanograms of genomic DNA is needed, and is faster than standard RFLP analysis, because it essentially only involves amplification and electrophoresis.

[0409] Microsatellites have been used extensively in linkage analysis (see, e.g., http://carbon.wi.mit.edu:8000/cgi-bin/contig/phys_map; http://www.chlc.org/; http://gdb.infobiogen.fr/gdb/contact.html#baltimore). They have many alleles and therefore are highly informative. Although microsatellites may be used in fine mapping and association analysis, they may have one or more features that should be considered in connection with such use. For example, the large number of alleles may become a consideration when using haplotype-based methods, they are not usually intragenic, and they may have relatively high and variable mutation rates which may affect linkage disequilibrium between a marker and disease mutation.

[0410] SNP markers may also be used in fine mapping and association analysis, as well as linkage analysis [see, e.g., Kruglyak (1997) Nature Genetics 17:21-24]. Although an SNP may have limited information content, combinations of SNPs (which individually occur about every 100-300 bases) may yield informative haplotypes. SNP databases are available (see, e.g., http://www.ibc.wustl.edu/SNP/; http://www.ncbi.nlm.nih.gov/SNP/; http://www. genome.wi.mit.edu/SNP/human/index.html). Assay systems for determining SNPs include synthetic nucleotide arrays to which labeled, amplified DNA is hybridized [see, e.g., Lipshutz et al. (1999) Nature Genet. 21:2-24; single base primer extension methods [Pastinen et al. (1997) Genome Res. 7:606-614], mass spectroscopy on tagged beads, and solution assays in which allele-specific oligonucleotides are cleaved or joined at the position of the SNP allele, resulting in activation of a fluorescent reporter system [see, e.g., Landegren et al. (1998) Genome Res. 8:769-776].

[0411] There are polymorphisms of chromosome 10 gene regions, in particular, chromosome 10q gene regions (e.g., chromosome 10q22, 10q23, 10q24 or 10q25 gene regions) that provide for allelic variants of the genes. Particular genes include the IDE, SNCG, KNSL1, LIPA, TNFRSF6 and PLAU genes. Some of the variants encode polymorphic proteins. Polymorphisms of the human IDE, SNCG, KNSL1, LIPA, TNFRSF6 and PLAU gene regions, in particular, exist. Provided herein are polymorphisms of IDE, SNCG, KNSL1, LIPA, TNFRSF6 and PLAU gene regions and isolated nucleic acid molecules containing polymorphisms of these gene regions. Included among the polymorphisms provided herein are polymorphisms of an IDE gene and surrounding region of chromosome 10 described in EXAMPLE 3 and included in EXAMPLE 3, Tables 4 and 4-B, polymorphisms of an SNCG gene and surrounding region of chromosome 10 described in EXAMPLE 2 and included in EXAMPLE 2, Table 2, polymorphisms of a KNSL1 gene and surrounding region of chromosome 10 described in EXAMPLE 3 and included in EXAMPLE 3, Tables 6 and 6-B, polymorphisms of a LIPA gene and surrounding region of chromosome 10 described in EXAMPLE 3 and included in EXAMPLE 3, Table 10, polymorphisms of aTNFRSF6 gene and surrounding region of chromosome 10 described in EXAMPLE 3 and included in EXAMPLE 3, Table 8, and polymorphisms of a PLAU gene and surrounding region of chromosome 10 described in EXAMPLE 4 and included in EXAMPLE 4, Tables 12 and 12-B.

[0412] Also provided and described herein below are polymorphisms of an IDE, KNSL1, SNCG, LIPA, TNFRSF6 or PLAU gene, or surrounding regions of chromosome 10, that are associated, individually and/or in combination, with a disease or disorder. In a particular example, the disease or disorder may be a neurodegenerative disease or disorder, such as, for example, Alzheimer's disease.

[0413] 2. Polymorphisms as Genetic Markers

[0414] Polymorphisms may be genetic markers. A genetic marker is a DNA segment with an identifiable location in a chromosome. Genetic markers may be used in a variety of genetic studies such as, for example, locating the chromosomal position or locus of a DNA sequence of interest, identifying genetic associations of a disease, and determining if a subject is predisposed to or has a particular disease.

[0415] Because DNA sequences that are relatively close together on a chromosome tend to be inherited together, tracking of a genetic marker through generations in a family and comparing its inheritance to the inheritance of another DNA sequence of interest can provide information useful in determining the relative position of the DNA sequence of interest on a chromosome. Genetic markers particularly useful in such genetic studies are polymorphic. Such markers also may have an adequate level of heterozygosity to allow a reasonable probability that a randomly selected person will be heterozygous.

[0416] As described in Example 1, microsatellite markers, including D10S583, as well as other markers on chromosome 10q, particularly markers on chromosome 10q22-q26, are linked to AD. The peak linkage occurs on the distal approximately 70-85 cM of the q arm of chromosome 10, from about 85 cM extending distally to qter. In terms of the cytogenetic map of chromosome 10, the peak linkage extends from 10q22 to qter. The strongest linkage is on 10q23-q25. Linkage analysis reveals cosegregation of a marker with the disease trait within individual families, and thus provides evidence that within each family, a particular allele of a marker, such as an allele of D10S583, is relatively close to at least one DNA segment that causes AD or confers an increased susceptibility to AD. As also described in Example 1, analysis of AD-linked marker D10S583 for genetic association with AD revealed association between an ˜210 bp to 211 bp allele of D10S583 and an allele that is protective against AD. Genetic association of an AD-linked marker and a population within families having AD-affected members, be it association with affected family members or with unaffected members, reveals that there is at least one AD DNA segment or AD gene within linkage disequilibrium distance of D10S583 and that there are AD-associated marker alleles in the thus-defined region of chromosome 10 that may be used in determining a predisposition to or the occurrence of AD in an individual.

[0417] Although the markers linked to AD as described in EXAMPLE 1, including D10S583, did not reveal a significant association with risk for AD, association analyses of multiple alleles of these markers revealed a trend toward risk. A disease gene, such as an AD gene, very likely may have several variant forms that place a person at risk for the disease, as well as variant forms that decrease the risk for AD and forms that are neutral (i.e., have a relative risk of 1.0). The data from association analyses of the linked markers described in EXAMPLE 1 are consistent with the possibility of multiple risk alleles of an AD gene on chromosome 10. Thus, the association of an allele of the AD-linked marker D10S583 with unaffected AD family members is consistent with the existence of at least one DNA segment that causes AD or confers increased susceptibility to AD on chromosome 10, and, in particular, chromosome 10q22-q26, such as the region of chromosome 10q23-q25, as well as being indicative of the presence of an allele on chromosome 10 that is protective against AD.

[0418] Any other marker found to be in linkage disequilibrium with D10S583 will be associated with an allele protective against AD and thus will also be evidence of the presence of at least one DNA segment that causes AD or confers increased susceptibility to AD on chromosome 10. Therefore, based on the discovery of association between D10S583 and AD, additional markers associated with AD or a protective allele may now be identified using methods as described herein and known in the art. The availability of additional markers is of particular interest in that it will increase the density of markers for this chromosomal region and can provide a basis for identification of an AD DNA segment or gene in the region of chromosome 10q, and in particular, chromosome 10q22-q26. An AD DNA segment or gene may be found in the vicinity of the marker or set of markers showing the highest correlation with AD. Furthermore, the availability of markers associated with AD makes possible genetic analysis-based methods of determining a predisposition to or the occurrence of AD in an individual by detection of a particular allele.

[0419] The search for disease-susceptibility genes generally may be conducted using two main analytical methods: linkage analysis, in which evidence is sought for cosegregation between a locus and a putative trait locus within families, and association analysis, in which evidence is sought for a statistically significant association between an allele and a trait or a trait-causing allele [Khoury et al. (1993) Fundamentals of Genetic Epidemiology, Oxford University Press, N.Y.]. These methods can be viewed as tools which may be applied in any of several approaches to disease gene discovery. Two primary approaches to disease gene discovery are genetic localization and candidate gene studies. The candidate gene approach typically takes into account knowledge of biological processes of a disease as a basis for selecting genes that encode proteins that could be envisioned to be involved in the biological processes. For example, reasonable candidate genes for blood pressure disorders could be proteins and enzymes involved in the renin-angiotensin system. Candidate genes can be evaluated genetically as possible disease genes by linkage and/or association studies of markers in the candidate gene region. Genetic localization approaches do not require knowledge of the biological or biochemical nature of the disease. In contrast to a full candidate gene approach, which immediately restricts genetic analysis of a chromosome to a specific gene region determined by a hypothesis based on trait biology, genetic localization approaches first identify a chromosomal region in which a disease gene or DNA segment is located and then gradually reduce the size of the region in order to determine the location of the specific defective DNA segment as precisely as possible. For example, in these methods, the position of an AD DNA segment or gene may be localized by determining LOD scores for different markers on chromosome 10. Candidate gene and genetic localization approaches to disease gene discovery can be combined. For example, once a particular chromosome or chromosomal region has been identified as being linked and/or associated with a disease, candidate genes in the particular chromosome or chromosomal region can be selected and genetically evaluated as possible disease genes.

[0420] C. Selection of Candidate and Discovery of Polymorphisms

[0421] Human chromosome 10 contains at least 600 genes. As described herein, six gene regions were selected as candidate disease-associated regions of chromosome 10. The genes and surrounding regions are IDE, SNCG, KNSL1, TNFRSF6, LIPA and PLAU. Criteria considered in the selection process included proximity of the genes to regions of chromosome 10 containing markers showing greatest linkage to AD (i.e., linkage peaks), such as D10S583 and D10S1671 (see Examples 1 and 2), e.g., expression in brain and gene products having one or more properties relating to one or more phenomena in neurodegenerative disease.

[0422] Discovery of polymorphisms is either by in silico discovery (database mining) or by wet discovery. Various algorithms can be applied to proprietary databases (e.g., those from Incyte Genomics (Palo Alto, Calif.); Celera Genomics (Rockville, Md.)) or public sequence databases (e.g., GenBank etc. from the National Center for Biotechnology Information (Bethesda, Md.)) for in silico discovery. Wet discovery utilizes various methods of manipulating nucleic acids to detect polymorphisms; including sequencing and comparison of sequence data, single-strand conformation polymorphism detection, immobilized mismatch-binding proteins, etc.

[0423] High throughput genomic DNA sequencing of candidate genes in DNA samples obtained from the NIMH led to the discovery of novel polymorphisms in the uPA, SNCG, IDE, KNSL1, TNFRSF6 and LIPA genes and surrounding regions in chromosome 10.

[0424] D. SNCG

[0425] The SNCG gene encodes gamma-synuclein (SNCG, a.k.a. persyn and breast cancer-specific gene 1 or BCSG1); a member of a family of small cytosolic proteins predominantly expressed in the nervous system (Lavedan (1998) Genome Res 8(9):871-880). Although their physiological functions are unknown, the synucleins may play a role in intracellular vesicular trafficking and signaling and also show chaperone-like activity. Gamma-synuclein increases the susceptibility of neurofilament-H to calcium-dependent proteases, and may participate in the regulation of neurofilament network integrity (Buchman et al. (1998) Nat Neurosci 1(2):101-103). The synucleins have been implicated in a variety of neurodegenerative disorders. A fragment of α-synuclein is the non-Aβ component of amyloid plaques in Alzheimer's disease (AD) (George et al. (1995) Neuron 15(2):361-72). Two mutations in the α-synuclein gene have been associated with familial Parkinson's disease (PD) (Polymeropoulos (1997) Science 276:2045-2047; Kruger (1998) (Letter) Nature Genet. 18:106-108; Narhi (1999) J Biol Chem 274(14):9843-6). Although one study was unable to detect β- or γ-synuclein coding sequence mutations associated with PD (Lavedan et al. (1998) DNA Research 5:401-402), all three synucleins have been found in aggregates at the sites of pathological lesions in the brains of patients with PD (Galvin et al. (1999) Proc Natl Acad Sci U.S.A. 96(23):13450-5). The synucleins are also present in brain lesions found in patients with neurodegeneration with brain iron accumulation, type 1 (NBIA 1).

[0426] Human SNCG, which maps to chromosome 10q23, is organized in 5 exons and encodes a 127-residue protein (Ninkina et al. (1998) Hum Mol Genet. 7(9):141 7-1424); GenBank accession numbers AF044311 and AF037207, respectively). It is highly expressed in adult substantia nigra, thalamus, STN, hippocampus, caudate nucleus and amygdala, at a moderate level in corpus callosum, heart and skeletal muscle, and low levels in pancreas, kidney and lung. High levels of γ-synuclein have been detected in elderly adult cerebral cortex (Ninkina et al. (1998) Hum Mol Genet. 7(9):1417-1424). SNCG is also highly expressed in advanced infiltrating breast carcinoma.

[0427] Several polymorphic regions (e.g., SNPs and the like) have been identified herein in the human SNCG gene and/or surrounding region of chromosome 10, as set forth in Example 2, Table 2.

[0428] E. IDE

[0429] Alzheimer's disease (AD) is characterized by the progressive and severe accumulation in the brain of the amyloid β-protein (Aβ) (Selkoe (1999) Nature 399:A23-A31). However, little is known about how Aβ, after being secreted, is degraded and cleared from tissues. Defective degradation of Aβ would be expected to be a risk factor for the development of AD.

[0430] It has been suggested that insulin-degrading enzyme (IDE), a thiol metalloendopeptidase known to cleave insulin, glucagon, and other peptide hormones may be involved in the degradation of endogenous brain-derived Aβ peptides (Kurochkin and Goto (1994) FEBS Lett 345:33-37; McDermott and Gibson (1996) D. NeuroReport 7:2163-2166; Qiu et al. (1998) J Biol. Chem 273:32730-32738). The protease is expressed in a variety of tissues including brain and has a conformational rather than a sequence specificity for its substrates. In mammalian cells, IDE has been principally localized to the cytosol and peroxisomes. (Chesneau et al. (1997) Endocrinology 138:3444-3451). It has also been shown that intact IDE, like Aβ, can be released into the extracellular fluid by healthy cultured microglial (BV-2) cells and is also present in normal CSF (Qui et al. (1998) J Biol Chem 273:32730-32738).

[0431] In addition, it has been demonstrated that neuronal-type cells exhibit significant extracellular Aβ-degrading activity that is inhibited by competitive IDE substrates and other IDE inhibitors (Vekrellis, et al. (2000) J Neurosci 20(5):1657-1665). IDE has been shown to be localized in part on the cell surface of differentiated neurons as well as non-neuronal cells (Seta and Roth (1997) Biochem Biophys Res Commun 231:167-171). It was confirmed that IDE has a major role in Aβ degradation by showing that cellular over expression of wild-type but not active site-mutated IDE markedly decreases the steady-state levels of naturally secreted Aβ₄₀ and Aβ₄₂ in the medium of APP-expressing cells.

[0432] Several polymorphisms have been identified herein in the human IDE gene and/or surrounding region of chromosome 10, including the intergenic region between the IDE and KNDL1 genes. These are listed in Tables 4 and 4-B.

[0433] F. KNSL1

[0434] Numerous studies suggest that aberrant trafficking or processing of APP may play a causative role in AD. Thus, understanding the normal mechanisms of axonal transport and trafficking of APP is essential to elucidating how APP participates in the development of AD.

[0435] In neurons, APP is transported within axons by fast anterograde axonal transport from the neuronal cell bodies to the distal nerve terminals. Antisense inhibition experiments using oligonucleotides complementary to kinesin heavy chain coding sequences in hippocampal neurons suggested that axonal transport of APP requires the micro-tubule-dependent motor protein kinesin-l (Ferreira et al. (1993) J. Neurosci. 13:3112-3123; Amaratunga et al. (1995) J. Neurochem. 64:2374-2376; Yamazaki et al. (1995) J. Cell Biol. 129:431-442; Kaether et al. (2000) Mol. Biol. Cell 11:1213-1224).

[0436] Kinesin-I was the first member of the kinesin superfamily to be identified (Brady (1985) Nature 317:73-75; Vale et al. (1985) Cell 42:39-50) and is responsible for ATP-dependent movement of vesicular cargoes within cells. Kinesin-I is composed of two kinesin heavy chain (KHC) and two kinesin light chain (KLC) subunits. In mouse, there are three genes encoding KHC (KIF5A, KIF5B, and KIF5C) and three genes encoding KLC (KLC1, KLC2, and KLC3) (Rahman et al. (1998) J. Biol. Chem. 273:15395-15403; Xia et al. (1998) Genomics 52:209-213). These KHC and KLC subunits appear to associate in all possible combinations. KIF4A and KIF5C are neuron-specific isoforms, whereas KLC1 is neuronally enriched. KIF5B and KLC2 are ubiquitously expressed; the expression pattern of KLC3 is unknown.

[0437] Both KHC and KLC have distinct conserved domains. KHC has an N-terminal motor domain, a central α-helical coiled-coil stalk domain, and a globular C-terminal tail domain, perhaps involved in cargo binding or motor regulation. KLC has a conserved N-terminal coiled-coil domain that binds KHC, and a C-terminal domain that consists of 6 imperfect repeats of a 34 amino acid tetra-trico peptide repeat (TPR) module. Although the function of the TPR domain in KLC is unknown, TPR domains are involved in protein-protein interactions in a large group of structurally and functionally diverse proteins (Lamb et al. (1995) Trends Biochem. Sci. 20:257-259; Blatch and Lassie (1999) Bioassays 21:932-939) and could thus be involved in linking KLC to receptor proteins in vesicular or organellar cargoes. Since some experiments suggested that “cargo” molecules themselves might interact directly with microtubule-dependent motor proteins (Tai et al. (1999) Cell 97:877-887; Bowman et al. (2000) Cell 103(4):583-594), the association of APP with the KLC subunit of kinesin-I was investigated. The data suggest that APP transport from sites of synthesis in the neuronal cell body to sites of utilization of pathogenesis at the axonal terminus is mediated by direct binding of APP to KLC.

[0438] Human Kinesin-like protein 1 (KNSL1) is an isoform of the heavy chain of Kinesin 1. KNSL1 has a role in cytokinesis (Sawin et al. (1992) Nature 359:540-543) and may also be involved in signalling within the cell via interaction with a family of GTP binding proteins referred to as the Arf's (Blangy et al. (1995) Cell 83(7):1159-1169; Boman et al. (1999) Cell Motil Cytoskeleton 44(2):119-1132; and Deavorus and Walker (1999) Biochem Biophys Res Commun 260(3):605-608).

[0439] Several polymorphisms have been identified herein in the human KNSL1 gene and/or surrounding region of chromosome 10, including the intergenic region between the IDE and KNSL1 gene. These are listed in Tables 6 and 6-B.

[0440] G. TNFRSF6

[0441] The TNFSR6 gene encodes tumor necrosis factor receptor superfamily, member 6, which has been mapped to 10q24.1 in humans. TNFRF6, also referred to as the Fas antigen, APO-1, CD95, FAS, APT1 and apoptosis antigen is a protein containing 335 amino acids and a single transmembrane domain. It has a calculated molecular weight of 35,000 (Itoh et al. (1991) Cell 66:233-243). TNFRF6 shows homology with a number of cell-surface receptors, including members of the tumor necrosis factor(TNF)/nerve growth factor receptor superfamily (Oehm et al. (1992) J. Biol. Chem. 267:10709-10715). The protein exhibits several domains important to its function, including a death domain, a ligand-binding domain and a transmembrane domain. TNFRSF6 mediates apoptosis (programmed cell death). TNFRSF6 is expressed in a limited number of tissues, including thymus, liver, ovary and heart.

[0442] Mice with the lymphoproliferation (Ipr) mutation have a defect in the Fas antigen gene, a T-to-A transversion resulting in the substitution of asparagine for isoleucine. These mice develop lymphadenopathy and a systemic lupus erythematosus-like autoimmune disease, indicating a role for the Fas antigen in the negative selection of autoreactive T cells in the thymus (Watanabe-Fukunaga et al. (1992) Nature 356:314-317). The Fas antigen is expressed on the surface of a number of normal and malignant cells, including activated human T and B lymphocytes and a variety of human lymphoid cell lines.

[0443] TNFRSF6 functions as a receptor for a cytokine ligand known as fas ligand. An adaptor molecule, fadd, recruits caspase-8 to the activated receptor. The resulting aggregate called the death-inducing signaling complex (disc) performs caspase-8 proteolytic activation. Active caspase-8 initiates the subsequent cascade of caspases (aspartate-specific cysteine proteases) mediating apoptosis. Fas-mediated apoptosis may have various roles including; the induction of peripheral tolerance, in the antigen-stimulated suicide of mature t-cells, or both. Also, tumor immune escape, mediating apoptosis of inactivated T cells, negative regulation of erythropoiesis through sequential activation of ICE-like (CASP4, CASP5) and CPP32-like (CASP3) caspases, playing a role in lymphoproliferative syndrome, T cell lymphoma and Hodgkin's disease. TNFRSF6 is mutated in the death domain in non-small lung cancer and non lymphoid malignancies. Also, TNFRSF6 may be involved in Churg-Strauss syndrome and the pathogeny of autoimmune diabetes.

[0444] An increased rate of cell death occurs in neurodegenerative diseases including AD. Elevated levels of FAS have been observed in the brains of AD patients. It has been suggested that Abeta induces neuronal apoptosis in the brain and that the JNK-c-Jun-Fas ligand-Fas pathway is involved in the Abeta-induced neuronal apoptosis (Morishima et al. (2001) J. Neurosci 21(19):7551-60).

[0445] Several polymorphisms have been identified herein in the human TNFRSF6 gene and/or surrounding region of chromosome 10. These are listed in Table 8.

[0446] H. LIPA

[0447] The LIPA gene encodes lysosomal acid lipase (a.k.a. acid cholesteryl ester hydrolase and cholesterol ester hydrolase). It has been mapped to 10q23.2-q23.3. LIPA is a 399 amino acid protein with a molecular weight of 45 kd. It is crucial for the intracellular hydrolysis of cholesterol esters and triglycerides that have been internalized via receptor-mediated endocytosis of lipoprotein, a process which is central to the supply of cholesterol to cells for growth and membrane function and regulation of processes involving cholesterol flux. LIPA is important in mediating the effect of low density lipoprotein (LDL) on suppression of hydroxymethylglutaryl-coa reductase and activation of endogenous cellular cholesterol ester formation (Brown et al. (1976) J. Biol. Chem. 251:3277-3286).

[0448] Two major human genetic disorders Wolman disease (WD) and cholesterol ester storage disease (CESD) are caused by mutations in different parts of the LIPA gene. These are autosomal recessive conditions which exhibit very low acid lipase/cholesteryl ester hydrolase activities, intralysosomal lipid accumulations and altered regulation of cholesterol production.

[0449] It has been proposed that neurodegenerative diseases, such as AD, results from disruption of cholesterol uptake and metabolism, which results in the abnormal trafficking of critical neuronal membrane proteins (Lynch C. and Mobley W. (2000) Ann NY Acad Sci 924:104-11). In addition, alterations in lipid homeostasis have been suggested to be related to both APOE and beta amyloid dysfunctions in AD (Poirier J. (2000) Ann NY Acad Sci 924:81-90).

[0450] Several polymorphisms have been identified herein in the human LIPA gene and/or surrounding region of chromosome 10. These are listed in Table 10.

[0451] I. Urokinase Plasminogen Activator (uPA)

[0452] Urokinase plasminogen activator (uPA; gene symbol=PLAU) is a serine protease which can catalyze the proteolytic cleavage of peptide bonds. For example, proteolytic cleavage of plasminogen catalyzed by uPA converts plasminogen to the active serine protease plasmin.

[0453] 1. Plasminogen/Plasmin System

[0454] Plasmin is a potent trypsin-like protease with a wide substrate specificity. For example, plasmin is a key element in the blood fibrinolytic system in which it degrades fibrin into soluble fibrin degradation products. Plasmin is the activated form of plasminogen, which is an inactive proenzyme. Conversion of plasminogen into the active plasmin enzyme occurs via the action of two serine protease plasminogen activators (PA): tissue-type (t-PA) and urokinase-type (u-PA) plasminogen activator. The plasminogen/plasmin system plays an important role in various biological processes involving proteolysis. In addition, through interplay with integrins and the extracellular matrix protein vitronectin, the system is also involved in the regulation of cell migration and proliferation in a manner independent of proteolytic activity [Irigoyen et al. (1999) Cell. Mol. Life Sci. 56:104-132].

[0455] Tissue-type PA-mediated plasminogen activation is mainly involved in the dissolution of fibrin in the circulation [see, e.g., Collen and Lijnen (1991) Blood 78:3114-3124]. Tissue-type PA has a high affinity for fibrin, and its enzymatic activity is enhanced by fibrin binding. Urokinase-type PA is recruited to the cell membrane immediately after secretion via binding to a specific cellular receptor, the u-PA receptor (u-PAR). Urokinase-type PA results in enhanced activation of cell-bound plasminogen and plays a role in localized cell-associated proteolysis. For example, u-PA appears to be involved in the induction of pericellular proteolysis via the degradation of matrix components or via activation of latent proteases or growth factors.

[0456] Plasmin is a broad-spectrum protease which degrades many substrates in the extracellular matrix. In addition, plasmin can activate matrix metalloproteases which break down the collagen components in the matrix. Urokinase-type PA has activities that play a role in stimulation of cellular proliferation, enhancement of cellular migration, alteration of cellular adhesive properties and activation of growth factors, such as vascular endothelial growth factor (VEGF) and human growth factor (HGF). Binding of uPA to uPAR leads to signal transduction, and possible activation of gene transcription, which may mediate the involvement of uPA in cell proliferation, migration and adhesion [Reuning et al. (1998) Int. J. Oncol. 13:893-906].

[0457] A plasmin-mediated proteolytic cascade is primarily responsible for mediating the proteolysis of insoluble fibrin polymers, which constitute the major proteinacious component of blood clots. Thus, the plasmin proteolytic cascade is also referred to as the fibrinolytic cascade. Although fibrin aggregation is crucial to the suppression of hemorrhaging from injured blood vessels, abnormal deposition of fibrin clots leads to cardiovascular diseases such as thrombosis, arterial neointima formation and atherosclerosis [see, e.g., Bini and Kudryk (1994) Thromb. Res. 75:337-341 and Blomback (1996) Thromb. Res. 83:1-75]. Fibrin deposition may be a consequence of low plasminogen activation due to high expression of plasminogen activator inhibitors (PAIs) or low expression of plasminogen activators (PAs). Because plasmin is a potent trypsin-like protease with a wide substrate specificity, yet plays a vital role in controlling fibrin clot generation, it's formation is tightly regulated in cells primarily through the availability of plasminogen activators, such as uPA, localized activation and plasminogen activator inhibitors. Therefore, maintaining appropriate amounts of uPA protein and uPA activity levels in cells is of great physiological importance in an organism, and in particular in humans.

[0458] Because of the role of uPA in fundamental cellular processes of physiological importance which also may be associated with pathological conditions, there is a need to identify factors that may affect the activity and expression of uPA. There is also a need to identify polymorphic uPA alleles and elucidate the variant phenotypic effects of such alleles in order to identify any involvement of the variants in disease.

[0459] 2. The uPA Gene and Encoded Protein

[0460] The uPA gene has been isolated from several mammalian species, including humans, [see, e.g., Nagamine et al. (1984) Nucl. Acids Res. 12:9525-9541; Riccio et al. (1985) Nucl. Acids Res. 13:2759-2771; Degen et al. (1986) J. Biol. Chem. 261:6972-6985; Degen et al. (1987) Biochemistry 26:8270-8279] and a sequence of the genomic uPA gene is known. Promoter regions of the isolated uPA genes have been studied. Based on those studies, generally, a uPA gene promoter contains a TATA box (a characteristic of regulated genes) and a GC-rich region of about 200 bases immediately upstream of the cap site (a characteristic of housekeeping genes). CAAT and GGGCGG sequences, which are recognized by transcription factors CTF and SP1, respectively, can be found upstream of the cap site. Thus, uPA gene expression may be at relatively low levels in some cells. Expression of a uPA gene may be induced by a variety of signals, such as growth factors, peptide hormones, steroid hormones, UV light and cell morphology. A uPA gene can contain an enhancer about 2 kb upstream of the cap site (from approximately −1875 to −1980) [Verde et al. (1988) Nucl. Acids Res. 16:10699-10716; Cassady et al. (1991) Nucl. Acids Res. 19:6839-6847].

[0461] Rapid turnover of uPA mRNA has been reported [Irigoyen et al. (1999) Cell. Mol. Life Sci. 56:104-132]. The 3′UTR of uPA mRNA contains about 900 bases and is highly conserved between rat, mouse, cow, pig and human and appears to govern the rapid uPA mRNA turnover [Nagamine et al. (1995) In: Fibrinolysis in Disease, pp. 10-20, Glas-Grenwalt P. (ed.), CRC, Boca Raton]. Three regions in the 3′UTR contribute independently to the rapid turnrover of mRNA and include a sequence with a stem structure, a region that requires ongoing transcription to destabilize the transcript and an AU-rich element responsible for PKC downregulation-induced uPA mRNA stabilization [Nanbu et al. (1994) Mol. Cell. Biol. 14:4920-4928].

[0462] The human uPA gene encodes an approximately 53-kDa protein produced as a single-chain protein (scuPA or pro-uPA) [Gunzler et al. (1982) Hoppe Seylers Z. Physiol. Chem. 363:1155-1165]. When secreted, pro-uPA binds to uPAR and is cleaved at the K158-I159 peptide bond by plasmin to yield an active two-chain form uPA (tcuPA or uPA). The active uPA can convert neighboring membrane-bound plasminogen to plasmin. The two peptide chains of uPA are linked by disulfide bridges, and the molecule contains three functional domains: a serine protease domain in the carboxyl terminal region, also called the B chain (approximately residues 144-411), an amino-terminal fragment, referred to as the A chain, containing a kringle domain (triple-disulfide-containing structure that binds protein; approximately residues 47-135) and an epidermal growth factor (EGF)-like domain (approximately residues 4-43) which is responsible for the specific interaction with uPAR. The activity of uPA can also be regulated by binding of PAIs and endocytosis.

[0463] Proteolytic cleavage or degradation of molecules involved in interaction of cells with their environment generates rapid and irreversible changes in the cellular microenvironment that may in turn affect the structure and function of the tissues. Thus, extracellular proteolysis can play a determining role in physiological and pathological processes [see, e.g., Werb (1997) Cell 91:439-442]. Polymorphisms of the genome can lead to altered gene function, protein function and/or mRNA instability. Because uPA plays an important role in proteolysis-dependent processes in cells, polymorphisms in uPA genes may significantly affect the proper functioning of cells and systems within organisms and may be directly involved in certain diseases or disorders or may predispose an organism to a variety of diseases and disorders, especially those involving alterations in proteolytic processing of proteins, and in particular proteins that tend to form aggregates, and/or alterations in the amount of bound uPA binding partners, such as PAIs, including PAI-1, and uPAR.

[0464] 3. Pathophysiology Involving the Plasminogen Activation System

[0465] There are pathophysiological conditions that involve imbalances in the plasminogen activation system, including, for example, cardiovascular diseases and tumor metastasis. For example, increased uPA protein and mRNA levels can occur in marcrophage-rich areas of necrotic atherosclerotic caps and in intimal smooth muscle cells of active atherosclerotic lesions and may contribute to macrophage and intimal smooth muscle cell migration into and within the lesion [Lupu et al. (1995) Arterioscler. Thromb. Vasc. Biol. 15:1444-1455]. Urokinase PA-mediated plasmin generation is involved in processes that underlie early initiation and progression of atherosclerosis, which include the modulation of intravascular fibrinolysis and hemostasis [Collen and Lijnen (1987) In The Molecular Basis of Blood Diseases, Stamatovannopoulos et al., eds., W. B. Saunders, Philadelphia, pp. 662-688; Lijnen and Collen (1995) Thromb. Haemost. 74:387-390], kinin activation [Habal et al. (1976) Adv. Exp. Med. Biol. 70:23-26], activation of matrix-destructive latent proteinases [Pepper et al. (1993) J. Cell Biol. 122:673-684], including metalloproteinases [Murphy et al. (1992) Matrix Suppl. 1:224-230; Jean-Claude et al. (1994) Surgery 116:472-478] and arterial wall matrix metalloproteinase [Schmitt et al. (1992) Biol. Chem. Hoppe-Seyler 373:611-622] and vascular matrix remodeling [Pedersen et al. (1995) Thromb. Haemost. 73:835-840]. Urokinase PA may also play a role in angiogenesis [Bacharach et al. (1992) Proc. Natl. Acad. Sci. U.S.A. 89:19686-19690], tissue remodeling that occurs during the early stage of cardiac morphogenesis and the pericellular proteolysis involved in smooth muscle migration and atheromatous plaque formation [Jackson et al. (1992) Ann. N.Y. Acad. Sci. 667:141-150]. Urokinase PA-mediated conversion of plasminogen to plasmin in the atherosclerotic plaque can result in degradation of matrix components and thus affects plaque stability [Preissner et al. (1999) Basic Res. Cardiol. 94:315-421]. Complications of atherogenesis include myocardial infarction and stroke. In the myocardium, elevated uPA activity and increased expression of uPA mRNA have been demonstrated during ischemia (coronary artery occlusion) [Knoepfler et al. (1995) J. Mol. Cell. Cardiol. 27:1317-1324].

[0466] In addition, uPA appears to have a central role in tumor angiogenesis and metastasis [Abbanai and Mazar (2001) Surg. Onc. Clin. North Am. 10:393; Konecny et al. (2001) Clin. Cancer Res. 7:1743-1749]. Prior to metastasis, expansion of a tumor involves angiogenesis, the formation of new blood vessels. Angiogenesis is a multistep process emanating from microvascular endothelial cells. Endothelial cells resting in parent vessels are stimulated to degrade the endothelial basement membrane, migrate into the perivascular stroma, and initiate a capillary sprout. The capillary sprout expands and assumes a tubular structure. Endothelial proliferation leads to extension of the microvascular tubules, which develop into loops and then into a functioning circulatory network. The exit of endothelial cells from the parent vessel involves cell migration and degradation of the extracellular matrix (ECM) in a manner similar to cancer cell invasion of the ECM.

[0467] In the process of tumor metastasis, some tumorigenic cells acquire the capacity to leave the place of origin, penetrate blood vessels, travel to remote sites of an organism and settle in different organs. Cancer cell invasion involves interactions of cancer cells with the ECM, a dense latticework of collagen and elastin embedded in a gel-like ground substance composed of proteoglycans and glycoproteins. The ECM contains a basement membrane and its underlying interstitial stroma. Tumor invasion involves: (1) cancer cell detachment from the original location, (2) attachment to the ECM, (3) degradation of the ECM, and (4) locomotion into the ECM [see, e.g., Liotta (1986) Cancer Res. 46:1-7]. After detachment, the cancer cells migrate over the ECM and adhere to ECM components such as laminin, type IV collagen and fibronectin via cell surface receptors. Cell adhesion molecules, such as integrin, have been shown to mediate cancer cell attachment to vascular endothelial cells and to matrix proteins [Mundy (1997) Cancer 80:1546-1556]. The attached cancer cell then secretes hydrolytic enzymes or induces host cells to secrete enzymes which locally degrade the matrix. Matrix lysis occurs in a highly localized region close to the cancer cell surface where the amount of active enzyme is disproportionately higher than that of proteinase inhibitors in the serum, matrix, or as secreted by nearby normal cells [Liotta et al. (1991) Cell 64:327-336]. Tumor aggressiveness may correlate with several classes of degradative enzymes, including heparinases, thiol-proteinases (including cathepsins B and L), metalloproteinases (including collagenases, gelatinases and stomelysins) and serine proteinases (including plamsin and urokinase plasminogen activator).

[0468] During the locomotion step of invasion, cancer cells migrate across the basement membrane and stroma through the zone of matrix proteolysis. The cancer cells then enter tumor capillaries (which arise as a consequence of specific angiogenic factors) and reach the general circulation via these capillaries. After traveling to other areas of the organism, the intravasated cancer cells adhere to and extravasate through the vascular endothelim and initiate new tumor formation. During cancer invasion, uPAR binds uPA released from surrounding cancer or stroma cells. Binding of uPA to its receptor focuses proteolytic action at the cancer cell surface. uPA converts inactive plasminogen into plasmin which degrades many ECM proteins such as fibronectin, vitronectin and firbrin thus facilitating ECM degradation, cancer cell proliferation, invasion and metastasis. uPA and uPAR are expressed in numerous tumor types including prostrate, breast, colon, glioblastoma, hepatocellular and renal cell carcinoma [de Witte et al. (1999) Br. J. Cancer 80:286-294; Hsu et al. (1995) Am. J. Pathol. 147:114-123; Mizukami et al. (1994) Clin. Immunol. Immunopathol. 71:96-104].

[0469] Inappropriate angiogenesis mediated by plasminogen activation is also involved in diseases such as, for example, diabetic retinopathy, corneal angiogenesis and Kaposi's sarcoma.

[0470] The plasminogen activation system appears to be critical in cell invasion processes and chronic inflammation. It operates both directly and in concert with the matrix-metalloproteinase system, and interactions between uPA and uPAR may be involved in eliciting chemotaxis, chemoinvasion and cell multiplication [Del Rosso et al. (1999) Clin. Exp. Rheumatol. 17:485-498]. As such, activity of uPA may affect proliferating and invading cells in inflammatory joint diseases. Thus, the plasminogen activation system may have a role in many aspects of the arthritic and rheumatic diseases, ranging from the infiltration of inflammatory cells into an affected joint, infiltration of synovial cells into underlying cartilage and remodeling of cartilage.

[0471] 4. Urokinase Plasminogen Activator and Neurodegenerative Disease

[0472] Proteolytic enzymes are involved in the catabolism of peptide neurotransmitters and structural cellular proteins in normal brain. Members of the serine protease family, including uPA, may play a role in normal development and/or pathology of the nervous system. Changes in the balance between serine proteases and their inhibitors may lead to pathological states similar to those associated with neurodegenerative diseases [Turgeon and Houenou (1997) Brain Res. Brain Res. Rev. 25:85-95].

[0473] A characteristic feature of Alzheimer's disease (AD) brain is the presence of amyloid-containing plaques, a major component of which is the Aβ peptide derived from a carboxy-terminal region of amyloid precursor protein (APP). Little is known about how Aβ, after being secreted, is degraded and cleared from tissues. Defective degradation of Aβ could be a factor in the development of AD. Plasmin is capable of degrading Aβ peptides in vitro with a relative efficiency comparable to its ability to degrade fibrin peptides.

[0474] Urokinase PA is expressed in the central nervous system (CNS) in neurons and may play a major role in cell migration during development of the CNS. Expression of the uPA gene is upregulated in transgenic mice containing high levels of Aβ deposits [Tucker et al. (2000) J. Neurosci. 20:3937-3946]. Increased expression of uPA may be a physiological response to these lesions. When considering the very high levels of Aβ peptides present in the AD brain, plasmin-mediated degradation of Aβ peptides could play an important role in controlling Aβ deposition and neuritic plaque formation.

[0475] Polymorphisms affecting expression of uPA in the CNS in turn affect the extent of plasminogen activation in the CNS. For example, a polymorphism in the promoter region of a uPA gene could effectively alter the level of expression of uPA mRNA in the CNS, resulting in altered levels of plasmin. Abnormal levels of uPA protein and resultant abnormal levels of activated plasmin may effect the levels of Aβ in brain and contribute significantly to the development of an AD phenotype. For example, abnormally low levels of activated plasmin may result in excess Aβ accumulation and predispose an individual to an Alzheimer's disease phenotype.

[0476] J. APOE4

[0477] Apolipoprotein E (ApoE) performs various functions as a protein constituent of plasma lipoproteins, including a role in cholesterol metabolism. In cerebral spinal fluid the Aβ binding factor was found to be APOE (Strittmatter et al. (1993) Proc. Natl. Acad. Sci. U.S.A. 90:1977-1981). The APOE-4 allele is a well-established susceptibility gene for late-onset AD. The APOE-4 allele is neither necessary or sufficient for AD, but modulates the risk of developing AD (Corder et al. (1993) Science 261:921-923; Corder et al. (1994) Nat Genet 7:180-184). The APOE-4 allele consists of a single base change polymorphism (T to C) at nucleotide position 3932 (GenBank Accession No. M10065) which results in a cysteine to arginine substitution at residue 112 of the protein.

[0478] K. Genetic Linkage

[0479] Polymorphisms in chromosome 10 located in the IDE, KNSL1, SNCG, LIPA, TNFRSF6 and PLAU genes and surrounding regions can be genetic markers that may be evaluated for linkage with disease. For example, the polymorphisms can be evaluated for linkage with an IDE-, KNSL1-, SNCG-, LIPA-, TNFRSF6- or uPA-mediated disease or a neurodegenerative disease such as Alzheimer's disease. Linkage analysis is based on establishing a correlation between the transmission of genetic markers and a specific trait throughout generations.

[0480] Genetic markers that are linked with a disease tend to cosegregate with a DNA segment associated with the disease, such as, for example, an AD gene, in families affected with the disease. The markers can be identified through any linkage assessment methods described herein or known to those of skill in the art, and provide scores or results indicative of linkage to disease when tested by such linkage determination methods. The markers may be used in a variety of methods. For example, a method for detecting the presence or absence in a subject of a polymorphism linked to a DNA segment associated with a disease such as Alzheimer's disease includes a step of analyzing the IDE, KNSL1, SNCG, LIPA, TNFRSF6 or PLAU gene or surrounding regions on chromosome 10 of the subject for a polymorphism linked to a DNA segment associated with the disease. A method for identifying a polymorphism linked to a DNA segment associated with a disease can include a step of analyzing a polymorphism in the IDE, KNSL1, SNCG, LIPA, TNFRSF6 or PLAU genes and surrounding regions on chromosome 10 for linkage to disease, such as a neurodegenerative disease, e.g., AD. A particular method would involve identifying such a linked polymorphism wherein the linkage is characterized by a significant or highly significant LOD score.

[0481] 1. Basis for Genetic Linkage

[0482] The closer together two sequences are on a chromosome, the less likely that a recombination event will occur between them, and the more closely linked they are. Thus, the recombination frequency, i.e., the probability that there is a recombination event between two loci (also referred to as the recombination fraction), can be used as a measure of the genetic distance between two gene loci. A recombination frequency of 1% is equivalent to 1 map unit, or 1 centimorgan (cM), which is roughly equivalent to 1,000 kb of DNA. Loci that segregate independently within a family are unlinked and have a recombination fraction of 50%, whereas linked loci cosegregate within a family and have a recombination fraction of less than about 50%. For example, genetic markers linked to a DNA segment associated with AD on chromosome 10 may have a recombination fraction of less than about 50%, or about 45% or less, or about 40% or less, or about 35% or less, or about 30% or less, or about 25% or less, or about 20% or less, or about 15% or less, or about 10% or less, or about 5% or less or about 2.5% or less, or about 2% or less, or about 1.5% or less or about 1% or less or about 0.5% or less, or about 0.1% or less, or about 0. The particular recombination fraction depends on the particular marker.

[0483] For example, in terms of the genetic distance between a linked marker on chromosome 10 and a DNA segment associated with a disease, such as AD, on chromosome 10, the markers may be less than about 85 cM from the DNA segment, or less than about 80 cM from the DNA segment, or less than about 75 cM from the DNA segment, or less than about 70 cM from the DNA segment, or less than about 65 cM from the DNA segment, or less than about 60 cM from the DNA segment, or less than about 55 cM from the DNA segment, or less than about 50 cM from the DNA segment, or less than about 45 cM from the DNA segment, or less than about 40 cM from the DNA segment, or less than about 35 cM from the DNA segment, or less than about 30 cM from the DNA segment, or less than about 25 cM from the DNA segment, or less than about 20 cM from the DNA segment, or less than about 15 cM from the DNA segment, or less than about 10 cM from the DNA segment, or less than about 5 cM from the DNA segment, or less than about 4 cM from the DNA segment, or less than about 3 cM from the DNA segment, or less than about 2 cM from the DNA segment, or less than about 1.5 cM from the DNA segment, or less than about 1.0 cM from the DNA segment, or less than about 0.75 cM from the DNA segment, or less than about 0.5 cM from the DNA segment or less than about 0.25 cM from the DNA segment, or less than about 0.2 cM from the DNA segment or less than about 0.15 cM from the DNA segment or less than about 0.1 cM from the DNA segment. The particular distance depends on the particular marker. A linked marker in the IDE, KNSL1, SNCG, LIPA, TNFRSF6 or PLAU genes or surrounding regions on chromosome 10 may be located within a DNA segment associated with a disease, e.g., AD, and may be a polymorphism in a disease gene, such as, for example, a polymorphism in an AD gene that is responsible for a defect in an AD gene. When a marker is located within a disease gene, it is referred to as coincident with the gene.

[0484] If two loci are situated on different chromosomes, the transmission of alleles from generation to generation of each locus will be random and they are said to be “unlinked.” If two loci are situated on the same chromosome, the transmission of alleles of one locus will be affected by the presence of the other locus such that the ratios of alleles are no longer independent, and the loci are referred to as “linked.” Thus, two loci may be said to be linked when they are located relatively close together on the same chromosome. A polymorphism in an IDE, KNSL1, SNCG, LIPA, TNFRSF6 or PLAU gene or surrounding regions on chromosome 10 that is linked to a disease, such as, for example, a neurodegenerative disease such as AD, is located sufficiently close to a DNA segment associated with the disease on chromosome 10 such that the marker and DNA segment are linked.

[0485] For example, in terms of the physical distance between a linked marker and a DNA segment associated with a disease such as AD on chromosome 10, the markers may be less than about 72 Mb from the DNA segment, or less than about 65 Mb from the DNA segment, or less than about 63 Mb from the DNA segment, or less than about 59 Mb from the DNA segment, or less than about 55 Mb from the DNA segment, or less than about 50 Mb from the DNA segment, or less than about 45 Mb from the DNA segment, or less than about 40 Mb from the DNA segment, or less than about 35 Mb from the DNA segment, or less than about 30 Mb from the DNA segment, or less than about 25 Mb from the DNA segment, or less than about 20 Mb from the DNA segment, or less than about 15 Mb from the DNA segment, or less than about 10 Mb from the DNA segment, or less than about 5 Mb from the DNA segment, or less than about 2.5 Mb from the DNA segment, or less than about 1 Mb from the DNA segment, or less than about 0.5 Mb from the DNA segment, or less than about 0.1 Mb from the DNA segment, or less than about 0.05 Mb from the DNA segment, or less than about 0.01 Mb from the DNA segment, or less than about 0.005 Mb from the DNA segment, or less than about 0.001 Mb from the DNA segment. The particular distance depends on the particular marker.

[0486] Two loci are completely linked when there is no recombination between them; the same alleles or phenotypes are always transmitted together from generation to generation within a family. An intermediate state of linkage, referred to as “incomplete linkage” occurs when the transmission of alleles of two loci deviates consistently and measurably from independent assortment (e.g., random transmission of alleles located on different chromosomes) but a consistent recombination fraction nonetheless exists for the loci [see, e.g., March (1999) Mol. Biotechnol. 13:113-122].

[0487] 2. Analysis of Genetic Linkage

[0488] Linkage analysis is based upon establishing a correlation between the transmission of genetic markers and that of a specific trait or trait gene throughout generations within a family. Thus the aim of linkage analysis is to detect marker loci that show cosegregation with a trait of interest in a pedigree.

[0489] a. Procedures

[0490] In conducting linkage analysis, two positions on a chromosome are followed from one generation to the next within a family to determine the frequency of recombination between them. This can be accomplished by genotyping DNA from fully informative individuals within pedigrees and counting recombinants and nonrecombinants. In a study of an inherited disease, such as AD, one chromosomal position, or locus, is marked by the disease gene and the other position is marked by a DNA sequence (referred to as genetic marker) that shows natural variation in the population, e.g., variable number of tandem repeats (VNTRs), such as minisatellites and microsatellites, single nucleotide polymorphisms (SNPs) and restriction fragment length polymorphisms (RFLPs). RFLPs are variations that modify the length of a restriction fragment. Minisatellites are tandemly repeated DNA sequences present in units of about 5-50 or more repeats which are distributed along regions of human chromosomes ranging from 0.1-20 kb in length. Microsatellites are tandemly repeated DNA sequences typically present in repeats of lesser units, e.g., up to 4 repeats, than those of minisatellites. Because microsatellites and minisatellites present many possible alleles, their informative content is very high. SNPs are densely spaced in the human genome and represent the most frequent type of variation.

[0491] Inheritance of a marker can be determined by analyzing DNA from each individual for the presence or absence of the marker whereas inheritance of the disease gene can be determined by examining whether the individual displays symptoms of the disease or is a parent of an affected individual or not. In every family, the inheritance of the genetic marker is compared to the inheritance of the disease state.

[0492] Linkage analysis may be two-point, i.e., comparing the segregation of a marker and a disease, or multipoint, i.e., simultaneous analysis of linkage between the disease and several genetic markers. Multipoint analysis can be advantageous in mapping a disease gene. For example, the informativeness of the pedigree is usually increased in multipoint analysis. Each pedigree has a certain amount of potential information, dependent on the number of parents heterozygous for the marker loci and the number of affected individuals in the family. However, not all markers are sufficiently polymorphic as to be informative in all those individuals. If multiple markers are considered simultaneously, then the probability of an individual being heterozygous for at least one of the markers is greatly increased. In addition, an indication of the position of the disease gene among the markers may be determined in multipoint analysis. This may allow identification of flanking markers, and thus eventually allows isolation of a small region in which the disease gene resides. Examples of computer software which may be used for multipoint analysis include GENEHUNTER-PLUS [Kruglyak et al. (1996) Am. J. Hum. Genet. 58:1347; Kong and Cox (1997) Am. J. Hum. Genet. 61:1179], ASPEX [see, e.g., Badner et al. (1998) Am. J. Hum. Genet. 63:880-888; Hauser et al. (1996) Genet. Epidemiol. 13:117-137; Davis and Weeks (1997) Am. J. Hum. Genet. 61:1431-1444] and LINKAGE [see Lathrop et al. (1984) Proc. Natl. Acad. Sci. U.S.A. 81:3443-3446].

[0493] b. Linkage Measurement

[0494] Linkage may be assessed by the LOD (logarithm of an odds ratio) score method [Morton (1955) Am. J. Hum. Genet. 7:277-318; Rice et al. (2001) Adv. Genet. 42:99-113] or other acceptable statistical linkage determination [see also Ott (1991) Analysis of Human Genetic Linkage, Baltimore, London, John Hopkins; Terwilliger and Ott (1994) Handbook of Human Genetic Linkage, Baltimore, John Hopkins University Press; Strachan and Read (1996) Human Molecular Genetics, Oxford. BIOS Scientific Publishers Ltd.; Sudbery (1998) Human Molecular Genetics, Harlow, Addison Wesley Longman; Lander and Schork (1994) Science 265:2037-2048]. In linkage analysis, a series of likelihood ratios (relative odds) at various possible values of Θ, ranging from 0 (no recombination) to 0.50 (random assortment) are calculated. The computed likelihoods are usually expressed as the logarithm of the likelihood ratio (LOD). The use of logarithms allows data collected from different families to be combined by simple addition. Computer programs are available that run the analyses involved in statistical linkage determination [see, e.g., LIPED; MLINK; Lathrop et al. (1984) Proc. Natl. Acad. Sci. U.S.A. 81:3443-3446; Terwilliger and Ott (1994) Handbook of Human Genetic Linkage, Baltimore, John Hopkins University Press and http://linkage.rockefeller.edu/soft/list.html]. A LOD score is the logarithm of the ratio of the likelihood that two loci are linked at a given distance (or recombination fraction Θ) to the likelihood that they are not linked (recombination fraction Θ=0.5; greater than 50 cM apart). The value of Θ at which the LOD score is the highest is considered to be the best estimate of the recombination fraction, the “maximum likelihood estimate.”

[0495] Positive LOD scores can be considered as evidence of linkage. Genetic markers in the IDE, KNSL1, SNCG, LIPA, TNFRSF6 or PLAU genes or surrounding regions on chromosome 10 linked to a DNA segment associated with a disease such as a neurodegenerative disease, e.g., AD, yield positive LOD scores when analyzed for linkage to the disease by a LOD score method. The positive LOD score may be greater than or equal to about 1.0, or greater than or equal to about 1.5, or greater than or equal to about 1.9, or greater than or equal to 2.0, or greater than or equal to about 2.2, or greater than or equal to about 2.6, or greater than or equal to about 2.7, or greater than or equal to about 2.8, or greater than or equal to about 3.0, or greater than or equal to about 3.12, or greater than or equal to about 3.2, or greater than or equal to about 3.5, or greater than or equal to about 4.0, or greater than or equal to about 4.5, or greater than or equal to about 5.0, or greater than or equal to about 5.4, or greater than or equal to about 5.5, or greater than or equal to about 6.0, or greater than or equal to about 6.5, or greater than or equal to about 7.0, or greater than or equal to about 7.5, or greater than or equal to about 8.0, or greater than or equal to about 8.5, or greater than or equal to about 9.0, or greater than or equal to about 9.5, or greater than or equal to about 10.0 or greater than or equal to about 10.5, or greater than or equal to about 11.0, or greater than or equal to about 11.5, or greater than or equal to about 12.0, or greater than or equal to about 12.5, or greater than or equal to about 13.0 or greater than or equal to about 13.5, or greater than or equal to about 14.0 or greater than or equal to about 14.5, or greater than or equal to about 15.0, or greater than or equal to about 15.5, or greater than or equal to about 16.0, or greater than or equal to about 16.5, or greater than or equal to about 17.0. The particular LOD score depends on the particular marker.

[0496] Criteria have been proposed for use in categorizing linkage analysis results in terms of the extent to which the results may serve as evidence of linkage between loci. For example, by some criteria [Morton (1955) Am. J. Hum. Genet. 7:277-318], a LOD score of 1.5 or greater is considered to be “suggestive” of linkage whereas a LOD score of 3 is considered as statistically significant evidence for linkage. The significance level, α, is that which is associated with a likelihood ratio test computed to the base e X²=lod(2In10). For a LOD score of 3, α 0.0001; for a LOD score of 1.5, α<0.004. It has also been proposed that a multipoint LOD score of 5.4 may be considered as “highly significant” evidence of linkage, whereas “significant” evidence of linkage may be viewed as a multipoint LOD score 3.6 or a two-point LOD score 3.3, and “suggestive” evidence of linkage is provided by multipoint LOD scores 2.2 or two-point LOD scores 1.9 [see, e.g., Lander and Kruglyak (1995) Nat. Genet. 11:241].

[0497] Linkage analysis methods can be used to screen the entire human genome for one or more chromosomal regions containing loci linked to a disease gene. In genome screening procedures, DNA from individual members of families in which one or more family members are trait positive is typed with respect to a set of genetic markers that includes multiple markers from each human chromosome. The resolution of the screen depends on the number of markers that are typed and the distance between the markers on each chromosome. Generally, the higher the density of the collection of markers, the higher the resolution of the mapping results. Typically, markers separated by an average distance of 10 cM or less are considered to provide for a fairly high resolution genome screen. In particular, an average marker separation of 9 cM or less is used for high-resolution mapping. The results of the typing are compared to the disease status of each individual, and these data are statistically evaluated using one or more of a variety of linkage analysis computer software programs [see, e.g., O'Connell and Weeks (1995) Nat. Genet. 11:402-408 describing the VITESSE algorithm]. Traditional LOD score analysis is a strong method for evaluating linkage in forms of a disorder showing obvious Mendelian inheritance, but weakens when the mode of transmission is complex and genetic parameters cannot be accurately specified. In such cases, statistical evaluation of genotyping data may be strengthened through use of allele sharing linkage methods in pairs of affected siblings or other relative pairs and association studies. Such methods are known in the art and/or described herein.

[0498] c. Statistical Methods in Linkage Analysis

[0499] Methods of analyzing genetic linkage are termed parametric (i.e., “model-based”) if gene frequency and penetrance must be estimated, and nonparametric otherwise. There are many models within each class.

[0500] (1) Parametric Linkage Analysis

[0501] Parametric linkage analysis [see, e.g., Ott (1991) Analysis of Human Genetic Linkage, Baltimore, London, John Hopkins and Terwilliger and Ott (1994) Handbook of Human Genetic Linkage, Baltimore, John Hopkins University Press] applied to large pedigrees with many affected individuals can be useful in the identification of highly penetrant genes. A number of computer software programs are available to conduct parametric linkage analysis [see, e.g., FASTLINK; Lathrop et al. (1984) Proc. Natl. Acad. Sci. U.S.A. 81:3443-3446; Cottingham et al. (1993) Am. J. Hum. Genet. 53:252-263; Schaffer et al. (1994) Hum. Heredity 44:225-237].

[0502] Parametric linkage analysis can be limited due to its reliance on the choice of a genetic model suitable for a particular trait, and may be difficult when applied to the analysis of complex genetic traits such as those due to the combined action of multiple genes and/or environmental factors. In the mapping of diseases lacking a clear Mendelian inheritance pattern or caused by several genes of low to moderate penetrance, it may be more suitable to utilize nonparametric analysis applied to small sets of affected relatives, such as affected sib pairs.

[0503] (2) Nonparametric Linkage Analysis

[0504] Nonparametric linkage analysis involves determining whether the inheritance pattern of a chromosomal region is not consistent with random Mendelian segregation by showing that affected relatives inherit identical copies of the region (i.e., allele sharing) more often than expected by chance. Distortions from expected ratios of allele sharing among relatives [usually sibs; see, e.g., Risch (1990) Am. J. Hum. Genet. 46:229-241] who share a disease phenotype are tested. This form of analysis is independent of the mode of inheritance of the disease and thus is well-suited for cases in which there is not an absolute correlation between phenotype and genotype, such as in many multifactorial traits in which multiple genes may contribute to observed phenotype.

[0505] Typically, nonparametric linkage analysis is based in the analysis of the proportion of alleles shared identical by descent (IBD) between two sibs affected with a disease (affected sib pairs). The degree of agreement at a marker locus in two individuals can also be measured by the number of alleles identical by state (IBS). Nonparametric linkage analysis can be used in genome wide scans of multifactorial diseases using linkage maps of genetic markers, e.g., microsatellite markers. A number of computer software programs are available to conduct nonparametric linkage analysis [see, e.g., MAPMAKER/SIBS, Lander and Kruglyak (1995) Am. J. Hum. Genet. 57:439-454; GENEHUNTER-PLUS, Kruglyak et al. (1996) Am. J. Hum. Genet. 58:1347; SIMIBD, Davis et al. (1996) Am. J. Hum. Genet. 58:867-880; ASPEX (MLS), Risch (1990) Am. J. Hum. Genet. 46:222-253].

[0506] L. Genetic Association of Polymorphisms in Chromosome 10 Gene Regions with Disease

[0507] Genetic analyses described herein led to the discovery of genetic association of polymorphisms of human chromosome 10q with Alzheimer's disease (AD). Polymorphisms (including SNPs) of genes (such as IDE, SNCG, KNSL1, LIPA, TNFRSF6 and PLAU) and surrounding regions on chromosome 10 were analyzed individually and in combination as haplotypes for association with AD using a family-based test method for association. Both individual SNPs and haplotypes that are associated with AD or protection against AD were identified.

[0508] For example, a global test for association of a haplotype of 3 SNPs corresponding to nucleotide positions 3169, 3947 and 6532, respectively, of SEQ ID NOS: 559 or 560 yielded results indicative of association with AD, even after correction of the results which involved dividing the probability value by the number of tests conducted. The results of separate analysis of individual alleles of the haplotype of three SNPs for association with AD indicated a possible nominal association with protection against AD. Thus, a haplotype of polymorphisms of the uPA (i.e., PLAU) gene which is indicative of association with AD has a T, C and T nucleotide at positions 3169, 3947 and 6532, respectively of SEQ ID NOS: 559 or 560, or the complements thereof at the complementary positions. Similarly, association analysis of polymorphisms of the LIPA gene yielded results indicative of association of a haplotype of 3 SNPs of the LIPA gene with protection against AD.

[0509] These findings provide evidence of association of polymorphisms of the human uPA and LIPA genes with AD. The results may also be indicative of the possible presence of an allele within the uPA and/or LIPA genes or within linkage disequilbrium distance of these genes on chromosome 10 that confers in those who carry the allele protection against AD relative to those who do not carry the allele.

[0510] Furthermore, the finding of global association of the haplotype of three SNPs with AD indicates that there is an allele of the uPA gene that is associated with one or more AD DNA segments or AD genes on chromosome 10, and in particular chromosome 10q, that either directly cause or confer an increased susceptibility to AD (e.g., a “risk” or “disease” allele). A protective allele generally has a counterpart disease risk allele. For example, the APOE gene, located in a peak linkage region on chromosome 19 identified in a genetic linkage analysis of late-onset AD families [Pericak-Vance et al. (1991) Am. J. Hum. Genet 48:1034-1050], has three common alleles designated ε2, ε3 and ε4. The ε3 allele is the most common allele, and the ε2 and ε4 alleles are considered variants which affect genetic susceptibility to AD. The ε4 allele is associated with an increased risk and earlier age-at-onset whereas the ε2 allele confers a decreased risk and older age-at-onset [Corder et al. (1994) Nat. Genet 7:180-184]. Thus, there may be multiple alleles of the uPA gene associated with AD wherein one or more is associated with risk or increased susceptibility for AD and one or more is associated with protection against AD.

[0511] Based on the discovery of association between polymorphisms of genes and surrounding regions of chromosome 10q, as described herein, additional polymorphisms associated with AD located, for example, in the IDE, KNSL1, LIPA, PLAU, SNCG and/or TNFRSF6 genes and surrounding regions, may now be identified using methods as described herein and known in the art. The availability of additional AD-associated polymorphisms is of particular interest in that it will increase the density of markers for this chromosomal region and can provide a basis for possible genetic analysis-based methods of determining a level of risk for AD and/or a predisposition to or the occurrence of AD in an individual by detection of a particular allele.

[0512] The discovery of association between polymorphisms of chromosome 10q, including polymorphisms of the IDE, KNSL1, LIPA and PLAU genes or surrounding regions, and AD thus provides a basis for genetic analysis methods described herein which include: methods for genotyping an individual, methods for identifying polymorphisms associated with a disease, such as a neurodegenerative disease including AD; methods for detecting polymorphisms associated with a disease, such as a neurodegenerative disease including AD; methods for detecting the presence of a DNA segment associated with a disease, such as a neurodegenerative disease including AD, in a subject; methods for determining the level of risk for a disease, such as a neurodegenerative disease including AD, in a subject; methods for determining a predisposition to and/or the occurrence of a disease, such as a neurodegenerative disease including AD, in a subject; methods for identifying a region or regions of the human genome containing a disease DNA segment or gene, such as a neurodegenerative disease DNA segment or gene, including an AD DNA segment or AD gene; methods for predicting response to treatment for a disease, such as a neurodegenerative disease including AD; methods for treating a disease, such as a neurodegenerative disease including AD; and methods for identifying a disease gene, such as a neurodegenerative disease, e.g., AD, gene. Also provided herein are compositions that may be used in methods described herein, such as nucleic acids that may be used as probes or primers for detection of polymorphisms associated with a disease, such as a neurodegenerative disease including AD, and combinations, kits and articles of manufacture containing the nucleic acids. Such compositions may also be used in methods of determining a predisposition to and/or the occurrence of a disease, such as a neurodegenerative disease including AD, in a subject.

[0513] Polymorphisms of the IDE, KNSL1, SNCG, LIPA, TNFRSF6 and PLAU genes and surrounding regions may be analyzed individually and in combinations, e.g., haplotypes, for genetic association with diseases or disorders or protection against diseases or disorders. Such diseases and disorders include an IDE-, KNSL1-, SNCG-, TNFRSF6-, LIPA- and/or uPA-mediated disease or disorder. For example, polymorphisms of these genes, individually and/or in combination, may be associated with a disease or disorder involving proteolysis, protein or peptide degradation, and/or interactions between the proteins encoded by these genes and other molecules. Particular diseases and disorders with which the polymorphisms may be associated include neurodegenerative disorders such as Alzheimer's disease and late-onset AD. Other diseases and disorders include insulin degrading enzyme-mediated diseases and disorders such as diseases involving insulin-regulation and peptide signalling, kinesin-like protein 1-mediated diseases and disorders such as mitotic disorders and diseases involving cell signalling and membrane transport, tumor necrosis factor receptor superfamily member 6-mediated diseases such as diseases involving apoptosis, lymphoproliferative diseases, T cell lymphoma, Hodkin's disease, non-small cell lung cancer, non-lymphoid malignancies, Churg-Strauss syndrome and autoimmune diseases, lysosomal acid lipase-mediated diseases such as lipid and cholesterol regulation diseases, gamma synuclein-mediated diseases such as diseases involving intracellular vesicular trafficking and cell signalling and urokinase plasminogen activator-mediated diseases. Urokinase plasminogen activator-mediated diseases include, for example, a disease or disorder involving proteolysis and/or involving interactions between uPA and other molecules, e.g., uPAR and PAIs. Particular diseases include, but are not limited to, thrombosis, thrombolytic diseases, stroke, atherosclerosis, coronary artery disease, cardiovascular disease, cardiac disorders, myocardial infarction, cardiomyopathies, proliferative diseases, cancer, tumor angiogenesis, tumor metastasis, arthritis, rheumatic diseases or inflammatory diseases, such as inflammatory joint diseases.

[0514] Thus, provided herein are methods of identifying polymorphisms associated with diseases and disorders. The methods involve a step of testing polymorphisms of an IDE, SNCG, KNSL1, LIPA, TNFRSF6 or PLAU gene, or surrounding region, and in particular a human gene, individually or in combination, e.g., haplotypes, for association with a disease or disorder. In particular embodiments, the polymorphisms analyzed, individually and/or in combinations, are those listed in the EXAMPLES and Tables herein.

[0515] The analysis or testing may involve genotyping DNA from individuals affected with the disease or disorder, and possibly also from related or unrelated individuals, with respect to the polymorphic marker and analyzing the genotyping data for association with the disease or disorder using methods described herein and/or known to those of skill in the art. For example, statistical analysis of the data may involve a chi-squared or Fisher's exact test and may be conducted in conjunction with a number of programs, such as the transmission disequilibrium test (TDT), affected family based control test (AFBAC) and the haplotype relative risk test (HRR). Case-control strategies can be applied to the testing, as can, for example, TDT approaches.

[0516] Also provided herein are polymorphisms of chromosome 10q, particularly human chromosome 10q and in the region containing the IDE, KNSL1, LIPA and PLAU genes, associated with AD. In particular embodiments, the AD is late-onset AD. The polymorphisms can be over-represented in cases in case-control studies and/or can be associated with affected individuals in a family-based association analysis. Alternatively, the polymorphisms can be under-represented in cases in case-control studies and/or associated with unaffected individuals in a family-based association analysis. The polymorphisms can be identified through linkage disequilibrium or association assessment methods described herein or known to those of skill in the art, and provide scores or results indicative of linkage disequilibrium with an AD DNA segment or gene or of association with AD when tested by such assessment methods. The polymorphisms are associated with AD as individual markers and/or in combinations, such as haplotypes, that are associated with AD.

[0517] Also provided herein are combinations of polymorphisms which are associated with AD. In one embodiment, each polymorphism in a combination is associated with AD. In other embodiments, some of the polymorphisms in the combination are associated with AD and some of the polymorphisms are not or none of the polymorphisms is associated with AD. In such embodiments, the combination of polymorphisms as a whole is associated with AD, such as in the case of a haplotype and in particular a globally associated haplotype.

[0518] 1. Genetic Association

[0519] When two loci are extremely close together, recombination between them is very rare, and the rate at which the two neighboring loci recombine can be so slow as to be unobservable except over many generations. The resulting allelic association is generally referred to as linkage disequilibrium. Linkage disequilibrium can be defined as specific alleles at two or more loci that are observed together on a chromosome more often than expected from their frequencies in the population. As a consequence of linkage disequilibrium, the frequency of all other alleles present in a haplotype carrying a trait-causing allele will also be increased (just as the trait-causing allele is increased in an affected, or trait-positive, population) compared to the frequency in a trait-negative or random control population. Therefore, association between the trait and any allele in linkage disequilibrium with the trait-causing allele will suffice to suggest the presence of a trait-related DNA segment in that particular region of a chromosome. On this basis, association studies are used in methods of locating and discovering disease-susceptibility genes.

[0520] A marker locus must be tightly linked to the disease locus in order for linkage disequilibrium to exist between the loci. In particular, loci must be very close in order to have appreciable linkage disequilibrium that may be useful for association studies. Association studies rely on the retention of adjacent DNA variants over many generations in historic ancestries, and, thus, disease-associated regions are theoretically small in outbred random mating populations. In practice, however, it is common to find some degree of linkage disequilibrium between alleles that are up to about 0.1-0.3 cM apart, or about 1 to 2 cM apart, or even 3 to 4 cM apart, and this can be used for disease gene mapping [Jorde (1995) Am. J. Hum. Genet. 56:11-14; Xiong and Guo (1997) Am. J. Hum. Genet. 60:1513-1531; Reich et al. (1995) Am. J. Hum. Genet. 56:11-14]. In contrast, linkage studies, by relying on identification of haplotypes that are inherited intact over several generations (such as in families or pedigrees of known ancestry) focus on recent, usually observable ancestry in which there have been relatively few opportunities for recombination to occur. Thus, disease gene regions identified by linkage will often be large, encompassing many tens of megabases of DNA.

[0521] The power of genetic association analysis to detect genetic contributions to complex disease can be much greater than that of linkage studies. Linkage analysis can be limited by a lack of power to exclude regions or to detect loci with modest effects. Association tests can be capable of detecting loci with smaller effects [Risch and Merikangas (1996) Science 273:1516-1517] which may not be detectable by linkage analysis. Studies based on pedigrees may only narrow the location of a trait-causing allele; in such cases, association may be a powerful method for fine-scale mapping which can serve to further refine the location of the allele.

[0522] The aim of association studies when used to discover disease-susceptibility genes is to identify particular genetic variants that correlate with the disease phenotype at the population level. The aim of association studies when used to discover genes that are protective against a disease, such as AD, is to identify particular genetic variants that correlate with unaffected individuals at the population level. Association at the population level may be used in the process of identifying a disease-susceptibility gene or DNA segment because it provides an indication that a particular marker is either a functional variant underlying the disease (i.e., a polymorphism that is directly involved in causing a particular trait) or is extremely close to the disease gene on a chromosome. When a marker analyzed for association with a disease is a functional variant, association is the result of the direct effect of the genotype on the phenotypic outcome. When a marker being analyzed for association is an anonymous marker, the occurrence of association is the result of linkage disequilibrium between the marker and a functional variant. Association analysis can also be used to identify an allele that is either a functional variant that is protective against a disease, such as AD, or an allele that is extremely close to a gene that confers protection against the disease.

[0523] There are a number of methods typically used in assessing genetic association as an indication of linkage disequilibrium, including the epidemiological case-control study of unrelated subjects and methods using family-based controls. Although the case-control design is relatively simple, it is the most prone to identifying DNA variants that prove to be spuriously associated (i.e., association without linkage) with disease [Cardon and Bell (2001) Nature Rev. Genet. 2:91-99]. Spurious association can be due to the structure of the population studied rather than to linkage disequilibrium. Thus, for example, if cases and controls are not ethnically comparable, then differences in allele frequency can emerge at loci that differentiate the groups whether the alleles are causally related to disease or not (a phenomenon referred to as population stratification). Linkage analysis of such spuriously associated allelic variants, however, would not detect evidence of significant linkage because there would be no familial segregation of the variants. Therefore, putative association between a marker allele and a disease trait identified in a case-control study should be tested for evidence of linkage between the marker and the disease before a conclusion of probable linkage disequilibrium is made. Association tests that avoid some of the problems of the standard case-control study utilize family-based controls in which parental alleles or haplotypes not transmitted to affected offspring are used as controls.

[0524] In contrast to genetic linkage, which is a property of loci, genetic association is a property of alleles. Association analysis involves a determination of a correlation between a single, specific allele (or all combinations of particular alleles of a haplotype when performing a global association analysis) and a trait across a population, not only within individual families. Thus, a particular allele found through an association study to be in linkage disequilibrium with a disease allele can form the basis of a method of determining a predisposition to or the occurrence of the disease in any individual.

[0525] Generally, detecting an association between a genotype and a phenotype involves the steps of: a) determining the frequency of at least one polymorphism in a trait positive population by genotyping; b) determining the frequency of the related polymorphism in a control population; and c) determining whether a statistically significant association exists between the genotype and the phenotype.

[0526] The control population may be a trait negative population, or a random population. Each of the genotyping steps a) and b) may be performed on a pooled biological sample derived from each of the populations or each of the genotyping of steps a) and b) is performed separately on biological samples derived from each individual in the population or a subsample thereof.

[0527] The general strategy to perform association studies using polymorphisms derived from a region carrying a candidate gene is to scan two groups of individuals (case-control populations) in order to measure and statistically compare the allele frequencies of the markers in both groups.

[0528] If a statistically significant association with a trait is identified for at least one or more of the analyzed polymorphisms, one can assume that either the associated allele is directly responsible for causing the trait (i.e., the associated allele is the trait-causing allele), or more likely the associated allele is in linkage disequilibrium with the trait causing allele. The specific characteristics of the associated allele with respect to the candidate gene function usually give further insight into the relationship between the associated allele and the trait (causal or in linkage disequilibrium). If the evidence indicates that the associated allele within the candidate gene is most probably not the trait-causing allele but is in linkage disequilibrium with the real trait-causing allele, then the trait-causing allele can be found by sequencing the vicinity of the associated marker, and performing further association studies with the polymorphisms that are revealed in an iterative manner.

[0529] Association studies are usually run in two successive steps. In a first phase, the frequencies of a reduced number of markers from the candidate gene are determined in the trait positive and control populations. In a second phase of the analysis, the position of the genetic loci responsible for the given trait is further refined using a higher density of markers from the relevant region. However, if the candidate gene under study is relatively small in length, a single phase may be sufficient to establish significant associations.

[0530] 2. Methods Used in Association Analyses

[0531] Association studies explore the relationships among frequencies for sets of alleles between loci. Association studies may be conducted within the general population and are not limited to studies performed on related individuals in affected families. There are several methods for testing for genetic association.

[0532] a. Case-Control Studies

[0533] The simplest form of association analysis is the case-control study in which unrelated populations of affected (or trait-positive) subjects (i.e., case individuals) and unrelated control (unaffected, trait-negative or random) individuals are analyzed. Such population-based association studies do not concern familial inheritance but compare the prevalence of a particular genetic marker or set of markers in case-control populations. Marker allele frequencies in each population may be compared using a chi-squared or Fisher's exact test (see, e.g., linkage.rockefeller.edu/software/utilities).

[0534] The control group is typically “matched” as much as possible to the case population, particularly to avoid problems of population stratification. Thus, the control group may be ethnically matched to the case population and matched for the main known confusion factor for the trait under study (e.g., age-matched for an age-dependent trait). An important step in the dissection of complex traits using association studies is the choice of case-control populations [see Lander and Schork (1994) Science 265:2037-2048]. A major step in the choice of case-control populations is the clinical definition of a given trait or phenotype. A genetic trait may be analyzed by association methods by carefully selecting the individuals to be included in the trait-positive and trait-negative phenotypic groups. Several criteria are often useful: clinical phenotype, age at onset, family history and severity. The selection procedure for continuous or quantitative traits (such as blood pressure, for example) involves selecting individuals at opposite ends of the phenotype distribution of the trait under study, so as to include in these trait-positive and trait-negative populations individuals with non-overlapping phenotypes. Preferably, case-control populations contain phenotypically homogeneous populations. Trait-positive and trait-negative populations contain phenotypically uniform populations of individuals representing each between 1 and 98%, or between 1 and 80%, or between 1 and 50%, or between 1 and 30%, or between 1 and 20% of the total population under study, and preferably selected among individuals exhibiting non-overlapping phenotypes. The clearer the difference between the two trait phenotypes, the greater the probability of detecting an association with markers. The selection of those drastically different but relatively uniform phenotypes enables efficient comparisons in association studies and the possible detection of marked differences at the genetic level, provided that the sample sizes of the populations under study are significant enough.

[0535] Allelic frequencies of markers in populations can be determined by genotyping pooled DNA samples or individual samples. When each individual is genotyped separately, simple gene counting may be applied to determine the frequency of an allele or of a genotype in a given population. The proportional representation of the allele for the population is then determined.

[0536] The allelic frequencies of the marker in case and control populations are analyzed to determine whether a statistically significant association exists between the genotype and phenotype. The statistical significance of a correlation between phenotype and genotype may be determined by any statistical test known in the art and with any accepted threshold of statistical significance being required. The application of particular methods and thresholds of significance are well within the level of skill of one skilled in the art. A commonly used statistical test is a chi-square test with one degree of freedom. A P-value is calculated, which is the probability that a statistic as large or larger than the observed one would occur by chance. If a statistically significant association with a trait is identified for at least one or more of the analyzed markers, it may be assumed that either the associated allele is directly responsible for causing the trait (i.e., the associated allele is the trait-causing allele), or more likely the associated allele is in linkage disequilibrium with the trait-causing allele.

[0537] In testing the association of a particular allele against the disease phenotype, it may be useful to correct the results. One such correction method is referred to as the “Bonferroni” correction in which the probability value required to give significance is divided by the number of tests conducted. For example, if five markers are tested, each with five alleles, a probability value of 0.002 would be required to declare significance at the 5% level. A P value can generally be considered statistically significant if it is less than or equal to about 1×10⁻², or less than or equal to 0.05 or less than 0.05. In carrying out association studies with the polymorphisms (polymorphic regions) described herein for the SNCG, KNSL1, IDE, LIPA, TNFRSF6 and PLAU genes and surrounding regions, significant associations between the polymorphic markers or allelic variants and disease, such as a neurodegenerative disease, e.g., AD, can be revealed and used as the basis for many methods employing the variants, for example, diagnostic, pharmacogenomic and drug-screening methods.

[0538] Case-control studies can be susceptible to false positive (type I) and false negative (type II) errors. Thus, a negative result may mean a lack of association or a false negative due to insufficient power to detect association. A positive result may mean an allelic association with disease, the presence of an unknown factor such as population stratification between cases and controls or a false positive due to an insufficient sample size for the tests being conducted. Calculators (see, e.g., http://www.stat.ucla.edu/calculators/powercalc/binomial/case-control/b-case-control-samp.html) are available to estimate required sample size for a given marker frequency, relative risk of interest, power and significance level (corrected if necessary for multiple tests).

[0539] Typical association studies based on candidate genes, and in particular, case-control studies, may have a limited ability to discern true medium-sized signals from false positives [see, e.g., Emahazion et al. (2001) Trends Genet. 17:407-413]. Thus, reports of positive association findings frequently cannot be replicated.

[0540] b. Case-Control Studies Using Family-Based Controls

[0541] Case-control studies using family-based controls have been developed to address possible errors relating to inadequate matching of unrelated cases and controls. Unlike case-control tests, family-based tests are not affected by population stratification, which can lead to spurious associations of a marker allele with disease susceptibility. Such analytical techniques include the transmission disequilibrium test (TDT) [Spielman et al. (1993) Am. J. Hum. Genet. 52:506-516], affected family based control test (AFBAC) [Thomson (1995) Am. J. Hum. Genet. 57:487-498 and Schaid and Sommer (1994) Am. J. Hum. Genet. 55:402-409] and the haplotype relative risk test (HRR) [Falk and Rubinstein (1987) Ann. Hum. Genet. 51:227-233; Terwilliger and Ott (1992) Hum. Hered. 42:337-346]. In these methods, family members (usually unaffected) can be used as internal controls. In the HRR and AFBAC tests, an affected individual and two parents are typed for a marker hypothesized to have an allele associated with the disease. The number of control alleles are derived from the parental alleles not transmitted to the affected child, and these are compared to the number of alleles transmitted to the affected child by a chi-squared test. In the TDT test, one of the parents must be heterozygous for the marker concerned, and the comparison is made between the alleles that are transmitted to the affected child and those that are not. Deviation from the expected Mendelian 50% transmission is tested by a chi-squared or Fisher's exact test.

[0542] The TDT focuses on alleles transmitted to affected offspring, but is formulated to take account of both the linkage and the disequilibrium that underlie the association. Depending on the data structure, TDTs are tests of either linkage or linkage and association. The proposed test statistic is a McNemar's chi-square and tests the null hypothesis that the putative disease-associated alleles transmitted 50% of the time from heterozygous parents; under the alternative hypothesis, the disease-associated allele will be transmitted more often.

[0543] The TDT has been extended to take into account multiallelic marker loci [Spielman and Ewens (1996) Am. J. Hum. Genet. 59:983-989; Sham and Curtis (1995) Ann. Hum. Genet. 59:323-336; Bickeboeller and Clerget-Darpoux (1995) Genet. Epidemiol. 12:865-870; and Rice et al. (1995) Genet. Epidemiol. 12:659-664], the availability of only one parent [Sun et al. (1999) Am. J. Epidemiol. 150:97-104], analysis of affected sibs or trios [Martin et al. (1997) Am. J. Hum. Genet. 61:439-448], multiple analysis of linked alleles in haplotypes [Clayton and Jones (1999) Am. J. Hum. Genet. 65:1161-1169 and Clayton (1999) Am. J. Hum. Genet. 65:1170-1177], pooled genotyping of affected children [Risch and Teng (1998) Genome Res. 8:1273-1288] and transmission from parents homozygous at a tightly linked locus [Lie et al. (1999) Am. J. Hum. Genet. 64:793-800]. Family-based tests, such as TDT, have largely required knowledge of parental marker genotypes; however, for late-onset diseases, parental data are often not available. There are tests of linkage and association that use unaffected siblings as surrogates for untyped parents from which probable parental genotypes may be derived [Spielman and Ewens (1998) Am. J. Hum. Genet. 62:450-458 (also referred to as the sib-TDT or S-TDT); Horvath and Laird (1998) Am. J. Hum. Genet. 63:1886-1897; Boehnke and Langefeld (1998) Am. J. Hum. Genet. 62:950-961]. The discordant unaffected sibling provides information on the alleles not segregating to affected individuals.

[0544] The FBAT is a unified approach to family-based association testing that is similar in design to the TDT but can accomodate variations in pedigree structures, arbitrary missing genotype information and various different disease models [Rabinowitz and Laird (2000) Hum. Hered. 50:227-233; Laird et al. (2000) Genet. Epi. 19 (Suppl. 1):S36-S42]. To account for the presence of linkage when using multiple affected siblings per nuclear family, the FBAT allows robust variance estimation (referred to as EV-FBAT) based on the empirical variance-covariance matrix of the contributions of each family to the score statistic [Lake et al. (2000) Am. J. Hum. Genet. 67:1515-1525].

[0545] A number of computer software programs are available for statistical analysis of genotyping data in family-based association tests, including the FBAT program [Rabinowitz and Laird (2000) Hum. Hered. 50:211-223; see also http://www.biostat.harvard.edu/fbat/default.html], the GASSOC program of statistical methods including an extension of the TDT for multiple marker alleles [Schaid (1996) Genet. Epidemiol. 13:423-449; see also http://www.mayo.edu.statgen/gassoc], the Quantitative (Trait) Transmission/Disequilibrium Test (QTDT) which includes support for the methods of Abecasis et al. [(2000) Am. J. Hum. Genet. 66:279-292], Fulker et al. [(1999) Am. J. Hum. Genet. 64:259-267], Monks et al. [(1998) Am. J. Hum. Genet. 63:1507-1516], Allison [(1997) Am. J. Hum. Genet. 60:676-690; TDTQ5] and Rabinowitz [(1997) Hum. Hered. 47:342-350] [see also http://www.well.ox.ac.uk/asthma/QTDT], the Transmission Disequilibrium Test and SIB Transmission Disequilibrium Test (TDT/S-TDT) [Spielman et al. (1993) Am. J. Hum. Genet. 52:506-516 and Spielman and Ewens (1998) Am. J. Hum. Genet. 62:450-458; see also http://spielman07.med.upenn.edu/TDT.htm], the ASSOC program in the Statistical Analysis for Genetic Epidemiology (SAGE) program uses the method of George and Elston [(1987) Genet. Epidemiol. 4:193-201; see also http://darwin.cwru.edu/pub/sage.html] and TRANSMIT [see http://www.mrc-bsu.cam.ac.uk/pub/methodology/genetics/]. The TRANSMIT program is a modification of the TDT that can handle multilocus haplotypes even if parental genotype or haplotype phase is missing.

[0546] The skilled person can carry out association studies with polymorphisms (polymorphic regions) of the IDE, SNCG, KNSL1, LIPA, TNFRSF6 and PLAU genes and surrounding regions. In doing so, significant associations between the polymorphic markers (allelic variants) can form the basis for a variety of methods employing detection and/or use of the polmorphisms or variants, such as, for example, diagnostic, pharmacogenomic and drug-screening methods.

[0547] 3. Haplotype Analysis

[0548] When a disease mutation is first introduced into a population (by a new mutation or the immigration of a mutation carrier), it necessarily resides on a single chromosome and thus on a single “background” or “ancestral” haplotype of linked markers. Consequently, there is complete disequilibrium between these markers and the disease mutation: the disease mutation is found only in the presence of a specific set of marker alleles. Through subsequent generations, recombination events occur between the disease mutation and these marker polymorphisms, and the disequilibrium gradually dissipates. The pace of this dissipation is a function of the recombination frequency, so the markers closest to the disease gene will manifest higher levels of disequilibrium than those that are farther away. When not broken up by recombination, “ancestral” haplotypes and linkage disequilibrium between marker alleles at different loci can be tracked not only through pedigrees but also through populations.

[0549] A haplotype can be tracked through populations and its statistical association with a given trait can be analyzed. Complementing single point (allelic) association studies with multi-point association studies, also called haplotype studies, increases the statistical power of association studies. Thus, a haplotype association, study allows one to define the frequency and the type of the ancestral carrier haplotype. A haplotype analysis is important in that it increases the statistical power of an analysis involving individual markers.

[0550] In a first stage of a haplotype frequency analysis, the frequency of the possible haplotypes based on various combinations of markers can be determined. The haplotype frequency is then compared for distinct populations of trait positive and control individuals. The number of trait positive individuals, which should be subjected to this analysis to obtain statistically significant results usually ranges between 30 and 300, with a preferred number of individuals ranging between 50 and 150. The same considerations apply to the number of unaffected individuals (or random control) used in the study. The results of this first analysis provide haplotype frequencies in case-control populations, for each evaluated haplotype frequency a p-value and an odd ratio are calculated. If a statistically significant association is found, the relative risk for an individual carrying the given haplotype of being affected with the trait under study can be approximated.

[0551] Detecting an association between a haplotype and a phenotype generally can involve the steps of: a) estimating the frequency of at least one haplotype in a trait positive population; b) estimating the frequency of this haplotype in a control population (trait negative or random population); and c) determining whether a statistically significant association exists between the haplotype and the phenotype. Methods of detecting an association between a haplotype and a phenotype include any method described herein or known in the art.

[0552] Determination of Haplotype Frequencies

[0553] When genotypes are determined, it is often not possible to distinguish heterozygotes so that haplotype frequencies cannot be easily inferred. When the gametic phase is not known, single chromosomes can be studied independently, for example, by asymmetric PCR amplification (see Newton et al. (1989) Nucleic Acids Res. 17:2503-2516; Wu et al. (1989) Proc. Natl. Acad. Sci. U.S.A. 86:2757), or by isolation of single chromosomes by limit dilution followed by PCR amplification (see Ruano et al. (1990) Proc. Natl. Acad. Sci. U.S.A. 86:9079-9083). Further, a sample may be haplotyped for sufficiently close markers by double PCR amplification of specific alleles (Sarkar, G. and Sommer S. S. (1991) Biotechniques). These approaches may not be entirely satisfying either because of their technical complexity, the additional cost they entail, their lack of generalization at a large scale, or the possible biases they introduce. To overcome these difficulties, an algorithm to infer the phase of PCR-amplified DNA genotypes introduced by Clark, A. G. (1990) Mol. Biol. Evol 7:111-122 may be used. Briefly, the principle is to start filling a preliminary list of haplotypes present in the sample by examining unambiguous individuals, that is, the complete homozygotes and the single-site heterozygotes. Then other individuals in the same sample are screened for the possible occurrence of previously recognized haplotypes. For each positive identification, the complementary haplotype is added to the list of recognized haplotypes, until the phase information for all individuals is either resolved or identified as unresolved. This method assigns a single haplotype to each multiheterozygous individual, whereas several haplotypes are possible when there are more than one heterozygous site.

[0554] Alternatively, haplotype frequencies can be estimated from the multilocus genotypic data. Any method known to person skilled in the art can be used to estimate haplotype frequencies (see, e.g., Lange (1997) “Mathematical and Statistical Methods for Genetic Analysis,” (Springer N.Y.); Weir (1996) “Genetic Data Analysis II: Methods for Discrete Population Genetic Data,” Sinauer Assoc., Inc. (Sunderland, Mass. U.S.A.)). For example, maximum likelihood haplotype frequencies can be computed using an Expectation-Maximization (EM) algorithm (see, e.g., Dempster et al. (1977) J. R. Stat. Soc. 39B:1-38; Excoffier and Slatkin (1995) Mol. Biol. Evol. 12:921-927). This procedure is an iterative process aiming at obtaining maximum likelihood estimates of haplotype frequencies from multi-locus genotype data when the gametic phase is unknown. Haplotype estimations are usually performed by applying the EM algorithm using for example the EM-HAPLO program (Hawley et al. (1994) Am. J. Phys. Anthropol. 18:104) or the Arlequin program (Schneider et al. (1997) “Arlequin: A Software for Population Genetics Data Analysis,” Univ. of Geneva). The EM algorithm is a generalized iterative maximum likelihood approach.

[0555] To ensure that the estimation finally obtained is the maximum-likelihood estimation, several values of departures are required. The estimations obtained are compared, and, if they are different, the estimations leading to the best likelihood are kept.

[0556] Estimating the frequency of a haplotype for a set of polymorphisms in a population can be carried out by: 1) genotyping at least one polymorphism for each individual in a population; 2) genotyping a second polymorphism by determining the identity of the nucleotides at the location of the polymorphism for both copies of the second polymorphism present in the genome of each individual in the population; and c) applying a haplotype determination method to the identities of the nucleotides determined in steps a) and b) to obtain an estimate of the frequency. Methods of estimating the frequency of a haplotype encompass methods used alone or in any combination and all others methods known to those of skill in the art in addition to those described herein.

[0557] Exemplary haplotypes useful in the methods provided herein, including methods for determining a predisposition to or occurrence of neurodegenerative disease, such as Alzheimer's disease include polymorphic regions of chromosome 10q. One exemplary haplotype includes polymorphisms or polymorphic regions of the IDE gene corresponding to nucleotides 2456, 3279, 3407 and 42943 of SEQ ID NO: 187, or the complementary positions thereof. In one embodiment, the nucleotide in IDE at position 2456 of SEQ ID NO: 187 is G, at position 3279 of SEQ ID NO: 187 is T, at position 3407 of SEQ ID NO: 187 is T, and at position 42943 of SEQ ID NO: 187 is T, or the complementary positions thereof. In another embodiment, the nucleotide in IDE at position 2456 of SEQ ID NO: 187 is T, at position 3279 of SEQ ID NO: 187 is T, at position 3407 of SEQ ID NO: 187 is C, and at position 42943 of SEQ ID NO: 187 is T, or the complementary positions thereof. In still a further embodiment, the nucleotide in IDE at position 2456 of SEQ ID NO: 187 is T, at position 3279 of SEQ ID NO: 187 is T, at position 3407 of SEQ ID NO: 187 is C, and at position 42943 of SEQ ID NO: 187 is C, or the complementary positions thereof. In yet another embodiment, the nucleotide in IDE at position 2456 of SEQ ID NO: 187 is T, at position 3279 of SEQ ID NO: 187 is C, at position 3407 of SEQ ID NO: 187 is C, and at position 42943 of SEQ ID NO: 187 is C, or the complementary positions thereof.

[0558] Another exemplary haplotype includes multiple polymorphic regions of the KNSL1 gene corresponding to nucleotides 132370, 133355, 147842 and 178981 of SEQ ID NO: 484, or the complementary positions thereof. In one embodiment, the nucleotide(s): at position 132370 of SEQ ID NO: 484 is A; between positions 133354-133355 of SEQ ID NO: 484 is a 6, 7 or 8 base pair poly-T insertion corresponding to -TTTTTT(T)(T)-; at positions 147842-147845 of SEQ ID NO: 484 is the 4 base pair insertion corresponding to -AGTT-; and between positions 178980-178981 of SEQ ID NO: 484 is the 5 base pair insertion corresponding to -AATTT-. In particular embodiments, the poly-T insertion can be 6 base pairs corresponding to -TTTTTT-; the poly-T insertion can be 7 base pairs corresponding to -TTTTTTT-; or the poly-T insertion can be 8 base pairs corresponding to -TTTTTTTT-.

[0559] Another exemplary haplotype includes multiple polymorphic regions of the LIPA gene corresponding to nucleotides 1852, 6063 and 7820 of SEQ ID NO: 468. In one embodiment, the nucleotide at position 1852 of SEQ ID NO: 468 is A, at position 6063 of SEQ ID NO: 468 is G, and at position 7820 of SEQ ID NO: 468 is C, or the complementary positions thereof. This haplotype can be used in methods provided herein such as methods of determining a level of risk for a neurodegenerative disease, e.g., AD, and in particular detecting possible protection against AD.

[0560] Another exemplary haplotype includes polymorphisms of a uPA gene or cDNA corresponding to nucleotide positions 3169, 3947, and 6532 of SEQ ID NOS: 559 or 560, or complementary positions thereof. In particular embodiments, the nucleotide identities at each of the three positions are as follows: T, C and T, respectively, or the complements thereof. The haplotype may also be described as including polymorphisms of a uPA gene or cDNA corresponding to nucleotide positions 498, 898 and 1512 of SEQ ID NO: 561, or complementary positions thereof. In particular embodiments, the nucleotide identities at each of the three positions are as follows: T, C and T, respectively, or the complements thereof.

[0561] 3. Calculation of Linkage Disequilibrium

[0562] Linkage disequilibrium is the non-random association of alleles at two or more loci and represents a powerful tool for mapping genes involved in disease traits (see, e.g., Ajioka et al. (1997) Am. J. Human Genet. 60:1439-1447). Any genetic markers may be used in genetic analysis based on linkage disequilibrium. SNPs, because they are densely spaced in the human genome and can be genotyped in greater numbers than other types of genetic markers (such as RFLP or VNTR markers), are particularly useful in genetic analysis based on linkage disequilibrium. When not broken up by recombination, “ancestral” haplotypes and linkage disequilibrium between marker alleles at different loci can be tracked not only through pedigrees but also through populations. Direct determination of linkage disequilibrium (as opposed to the obtaining of indirect evidence of linkage disequilibrium as is obtained in association analysis of a marker, or haplotype, and a trait) is usually seen as an association between one specific allele at one locus and another specific allele at a second locus.

[0563] The pattern or curve of disequilibrium between disease and marker loci is expected to exhibit a maximum that occurs at the disease locus. Consequently, the amount of linkage disequilibrium between a disease allele and closely linked genetic markers may yield valuable information regarding the location of the disease gene. For fine scale mapping of a disease locus, it is useful to have some knowledge of the patterns of linkage disequilibrium that exist between markers in the studied region. The mapping resolution achieved through the analysis of linkage disequilibrium is much higher than that of linkage studies.

[0564] Because direct calculation of linkage disequilibrium requires a comparison of two genetic positions, it is generally used to quantify the extent of linkage disequilibrium in a chromosomal region once a single- or multi-locus disease association has been identified. Methods familiar to those who practice the art can be used to calculate linkage disequilibrium.

[0565] 4. Interaction Analysis

[0566] The polymorphisms disclosed herein may also be used to identify patterns of polymorphisms associated with detectable traits resulting from polygenic interactions. The analysis of genetic interaction between alleles at unlinked loci (for example alleles of chromosome 10, such as alleles of the uPA, SNCG, IDE, KNSL1, TNFRSF6 and LIPA genes and APOE4 on chromosome 19) requires individual genotyping using the techniques described herein. The analysis of allelic interaction among a selected set of markers (polymorphisms) with appropriate level of statistical significance can be considered as a haplotype analysis. Interaction analysis consists in stratifying the case-control populations with respect to a given haplotype for the first loci and performing a haplotype analysis with the second loci with each subpopulation.

[0567] Genotypes and haplotypes of polymorphisms in the uPA, SNCG, IDE, LIPA, TNFRSF6 and KNSL1 genes and surrounding regions, can be analyzed for association with diseases including Alzheimer's disease and other neurodegenerative diseases, and for association with protection against such diseases utilizing the above-described methods. These genotypes and/or haplotypes are useful in diagnosis of susceptibility, determining a level of risk and in pharmacogenomics.

[0568] The choice of an allelic variant to be analyzed for association, individually or as part of a collection of allelic variants (a haplotype) can include the use of one or more of the following criteria. An allelic variant to be analyzed for association with disease should show a concentration in affected individuals vs unaffected individuals and for protection should show a concentration in unaffected vs affected individuals. The prevalence of the allele should not be such that it is considered too rare. Preferably, the prevalence should be about 20% or greater. If there is significant linkage disequilibrium among a group of alleles, typically only one of the group will be chosen to analyze for association, as it is assumed that the other alleles will give the same results. Of particular interest analysis of allelic variants that potentially affect gene or protein function; such as those that cause missense mutations, cause a significant change in an amino acid or those that alter a gene regulatory element, e.g., a promoter element.

[0569] Furthermore, individual alleles and haplotypes of uPA, SNCG, IDE, LIPA, TNFRSF6 and KNSL1 genes and surrounding regions can also be examined with alleles at unlinked loci, such as APOE4, to provide combinations useful in, for example, diagnosis, determining level of risk and/or pharmacogenomics.

[0570] M. Methods of Detecting Polymorphisms in Chromosome 10 and Genes Contatained Therein

[0571] Provided herein are methods of genotyping or haplotyping a subject or individual. The methods include a step of determining the identity of a nucleotide or sequence of nucleotides, or determining the length of a sequence of nucleotides, at a polymorphic region or site of chromosome 10, such as chromosome 10q in a nucleic acid sample. In particular embodiments, the identity of a nucleotide or sequence of nucleotides, or the length of a sequence of nucleotides at a polymorphic region or site of one or more of the IDE, KNSL1, SNCG, LIPA, TNFRSF6 and PLAU genes and surrounding regions is determined. In particular embodiments, the polymorphic region or site is one or more of the polymorphisms of the IDE, KNSL1, SNCG, LIPA, TNFRSF6 and PLAU genes and surrounding regions specifically described or provided herein, such as with reference to nucleotide positions in specified sequences and also with reference to particular nucleotides or sequences of nucleotides.

[0572] Also provided are methods of detecting in a nucleic acid sample, such as a sample containing nucleic acid from a subject or individual, the presence or absence of a polymorphism or allelic variant in chromosome 10, such as in chromosome 10q, and, in particular, in one or more of the IDE, KNSL1, SNCG, LIPA, TNFRSF6 and PLAU genes and surrounding regions. In particular embodiments, the polymorphic region or site is one or more of the polymorphisms of the IDE, KNSL1, SNCG, LIPA, TNFRSF6 and PLAU genes and surrounding regions specifically described or provided herein, such as with reference to nucleotide positions in specified sequences and also with reference to particular nucleotides or sequences of nucleotides.

[0573] The methods of genotyping, haplotyping and of detecting the presence or absence of a polymorphism or allelic variant can be used in a number of processes. For example, the genotyping, haplotyping and polymorphism detection methods can be used in methods of identifying polymorphisms associated with a disease or disorder, methods of detecting the polymorphisms associated with a disease or disorder, methods of identifying a region(s) of the human genome containing a disease DNA segment or gene, methods for determining the level of risk for a disease or disorder, methods for determining a predisposition to or the occurrence of a disease or disorder, methods for predicting a response to a treatment for a disease, methods for treating a disease, and methods for confirming a phenotypic diagnosis of a disease.

[0574] Any method known in the art can be used to identify a nucleotide, nucleotide sequence or the length of a nucleotide sequence. Many methods are available for detecting specific alleles at human polymorphic loci. The preferred method for detecting a particular polymorphism, depends on the nature of the polymorphism. Several methods of determining the presence or absence of allelic variants of a human gene are described below. Methods that are useful are not limited to those described below, but include all available methods.

[0575] 1. Nucleic Acid Detection Methods

[0576] Generally, these methods are based in sequence-specific polynucleotides, oligonucleotides, probes and primers. Any method known to those of skill in the art for detecting a specific nucleotide within a nucleic acid sequence or for determining the identity of a specific nucleotide in a nucleic acid sequence is applicable to the methods of determining the presence or absence of an allelic variant of these genes on chromosome 10. Such methods include, but are not limited to, techniques utilizing nucleic acid hybridization of sequence-specific probes, nucleic acid sequencing, selective amplification, analysis of restriction enzyme digests of the nucleic acid, cleavage of mismatched heteroduplexes of nucleic acid and probe, alterations of electrophoretic mobility, primer specific extension, oligonucleotide ligation assay and single-stranded conformation polymorphism analysis. In particular, primer extension reactions that specifically terminate by incorporating a dideoxynucleotide are useful for detection. Several such general nucleic acid detection assays are known (see, e.g., U.S. Pat. No. 6,030,778).

[0577] Any cell type or tissue may be utilized to obtain nucleic acid samples, e.g., bodily fluid such as blood or saliva, dry samples such as hair or skin.

[0578] a. Primer Extension-Based Methods

[0579] Several primer extension-based methods for determining the identity of a particular nucleotide in a nucleic acid sequence have been reported (see, e.g., PCT Application Nos. PCT/US96/03651 (WO96/29431), PCT/US97/20444 (WO 98/20166), PCT/US97/20194 (WO 98/20019), PCT/US91/00046 (WO91/13075), and U.S. Pat. Nos. 5,547,835, 5,605,798, 5,622,824, 5,691,141, 5,872,003, 5,851,765, 5,856,092, 5,900,481, 6,043,031, 6,133,436 and 6,197,498.) In general, a primer is prepared that specifically hybridizes adjacent to a polymorphic site in a particular nucleic acid molecule. The primer is then extended in the presence of one or more dideoxynucleotides, typically with at least one of the dideoxynucleotides being the complement of the nucleotide that is polymorphic at the site. The primer and/or the dideoxynucleotides may be labeled to facilitate a determination of primer extension and identity of the extended nucleotide.

[0580] A preferred method of genotyping or determining the presence of an allelic variant two-dye fluorescence polarization detected single base extension (FP-SBE (12)) on an LJL-Biosystems Criterion Analyst AD (Molecular Devices, Sunnyvale, Calif.). PCR primers are designed to yield products between 200-400 bp in length, and are used at a final concentration of 100-300 nM (Invitrogen Corp., Carlsbad, Calif.) along with Taq polymerase (0.25 U/reaction; Qiagen, Valencia, Calif. and Roche, Indianapolis, Ind.) and dNTPs (2.5 uM/rxn; Amersham-Pharmacia, Piscataway, N.J.). All PCR reactions are performed from ˜10 ng of DNA. General PCR thermo-cycling conditions are as follows: initial denaturation 3 minutes at 94° C., followed by 30-35 cycles of denaturation at 94° C. for 45 seconds, primer-specific annealing temperature (see below) for 45 seconds, and product extension at 72° C. for 1 minute. Final extension at 72° C. for six minutes. PCR products can be visualized on 2% agarose-gels to confirm a single product of the correct size. PCR primers and unincorporated dNTPs can be degraded by adding exonuclease I (Exol, 0.1-0.15 U/reaction; New England Biolabs, Beverly, Mass.) and shrimp alkaline phosphatase (SAP, 1U/reaction; Roche, Indianapolis, Ind.) to the PCR reactions and incubating for 1 hour at 37° C., followed by 15 minutes at 95° C. to inactivate the enzymes. The single base extension step is performed by directly adding SBE primer (100 nM; Invitrogen Corp., Carlsbad, Calif.), Thermosequenase (0.4 U/reaction; Amersham-Pharmacia, Piscataway, N.J.), and the appropriate mixture of R110-ddNTP, TAMRA-ddNTP (3 uM; NEN, Boston, Mass.), and all four unlabeled ddNTPs (22 or 25 uM; Amersham-Pharmacia, Piscataway, N.J.) to the Exol/SAP treated PCR product. Acycloprime-FP SNP detection kits (G/A)(Perkin-Elmer, Boston, Mass.) may also be used for the SBE reaction. Incorporation of the SNP specific fluorescent ddNTP is achieved by subjecting samples to 35 cycles of 94° C. for 15 seconds and 55° C. for 30 seconds. The length of the SBE primers are designed to yield a melting temperature Tₘ of 62-64° C. Fluorescent ddNTP incorporation is detected using the Analyst™ AD System (Molecular Devices, Sunnyvale, Calif.) and measuring fluorescent polarization for R110 (excitation at 490 nm, emission at 520 nm) and TAMRA (excitation at 550 nm, emission at 580 nm). Genotypes are called manually or automatically using the manufacturer's software (‘Allelecaller vers. 1.0’, Molecular Devices, Sunnyvale, Calif.). In view of the polymorphic regions provided herein, SNP specific PCR primers (5′ to 3′ sequences), annealing temperature, product length, SBE primer sequence, SNP location and reference sequence position, can readily be determined by those of skill in the art using well-known methods.

[0581] b. Polymorphism-Specific Probe Hybridization

[0582] Another detection method is allele specific hybridization using probes overlapping the polymorphic site and having about 5, 10, 15, 20, 25, or 30 nucleotides around the polymorphic region. The probes can contain naturally occurring or modified nucleotides (see U.S. Pat. No. 6,156,501). For example, oligonucleotide probes may be prepared in which the known polymorphic nucleotide is placed centrally (allele-specific probes) and then hybridized to target DNA under conditions which permit hybridization only if a perfect match is found (Saiki et al. (1986) Nature 324:163; Saiki et al. (1989) Proc. Natl Acad. Sci U.S.A. 86:6230; and Wallace et al. (1979) Nucl. Acids Res. 6:3543). Such allele specific oligonucleotide hybridization techniques may be used for the simultaneous detection of several nucleotide changes in different polymorphic regions. For example, oligonucleotides having nucleotide sequences of specific allelic variants are attached to a hybridizing membrane and this membrane is then hybridized with labeled sample nucleic acid. Analysis of the hybridization signal will then reveal the identity of the nucleotides of the sample nucleic acid. In a preferred embodiment, several probes capable of hybridizing specifically to allelic variants are attached to a solid phase support, e.g., a “chip”. Oligonucleotides can be bound to a solid support by a variety of processes, including lithography. For example a chip can hold up to 250,000 oligonucleotides (GeneChip, Affymetrix, Santa Clara, Calif.). Mutation detection analysis using these chips comprising oligonucleotides, also termed “DNA probe arrays” is described e.g., in Cronin et al. (1996) Human Mutation 7:244 and in Kozal et al. (1996) Nature Medicine 2:753. In one embodiment, a chip includes all the allelic variants of at least one polymorphic region of a gene. The solid phase support is then contacted with a test nucleic acid and hybridization to the specific probes is detected. Accordingly, the identity of numerous allelic variants of one or more genes can be identified in a simple hybridization experiment.

[0583] c. Nucleic Acid Amplification-Based Methods

[0584] In other detection methods, it is necessary to first amplify at least a portion of a gene prior to identifying the allelic variant. Amplification can be performed, e.g., by PCR and/or LCR, according to methods known in the art. In one embodiment, genomic DNA of a cell is exposed to two PCR primers and amplification is performed for a number of cycles sufficient to produce the required amount of amplified DNA. In another embodiment, the primers are located between 150 and 350 base pairs apart.

[0585] Alternative amplification methods include: self sustained sequence replication (Guatelli, J. C. et al. (1990) Proc. Natl. Acad. Sci. U.S.A. 87:1874-1878), transcriptional amplification system (Kwoh, D. Y. et al. (1989) Proc. Natl. Acad. Sci. U.S.A. 86:1173-1177), Q-Beta Replicase (Lizardi, P. M. et al. (1988) Bio/Technology 6:1197), or any other nucleic acid amplification method, followed by the detection of the amplified molecules using techniques well known to those of skill in the art. These detection schemes are especially useful for the detection of nucleic acid molecules if such molecules are present in very low numbers.

[0586] Alternatively, allele specific amplification technology, which depends on selective PCR amplification may be used in conjunction with the alleles provided herein. Oligonucleotides used as primers for specific amplification may carry the allelic variant of interest in the center of the molecule (so that amplification depends on differential hybridization) (Gibbs et al. (1989) Nucleic Acids Res. 17:2437-2448) or at the extreme 3′ end of one primer where, under appropriate conditions, mismatch can prevent, or reduce polymerase extension (Prossner (1993) Tibtech 11:238; Newton et al. (1989) Nucl. Acids Res. 17:2503). In addition it may be desirable to introduce a restriction site in the region of the mutation to create cleavage-based detection (Gasparini et al. (1992) Mol. Cell Probes 6:1).

[0587] d. Nucleic Acid Sequencing-Based Methods

[0588] Any of a variety of sequencing reactions known in the art can be used to directly sequence at least a portion of a gene and to detect allelic variants, e.g., mutations, by comparing the sequence of the sample sequence with the corresponding wild-type (control) sequence. Exemplary sequencing reactions include those based on techniques developed by Maxam and Gilbert (1977) Proc. Natl. Acad. Sci. U.S.A. 74:560) or Sanger et al. (1977) Proc. Natl. Acad. Sci 74:5463. It is also contemplated that any of a variety of automated sequencing procedures may be used when performing the subject assays ((1995) Biotechniques 19:448), including sequencing by mass spectrometry (see, for example, U.S. Pat. Nos. 5,547,835, 5,691,141, and International PCT Application No. PCT/US94/00193 (WO 94/16101), entitled “DNA Sequencing by Mass Spectrometry” by H. Koster; U.S. Pat. Nos. 5,547,835, 5,622,824, 5,851,765, 5,872,003, 6,074,823, 6,140,053 and International PCT Application No. PCT/US94/02938 (WO 94/21822), entitled “DNA Sequencing by Mass Spectrometry Via Exonuclease Degradation” by H. Koster, and U.S. Pat. Nos. 5,605,798, 6,043,031, 6,197,498, and International Patent Application No. PCT/US96/03651 (WO 96/29431) entitled “DNA Diagnostics Based on Mass Spectrometry” by H. Koster; Cohen et al. (1996) Adv Chromatogr 36:127-162; and Griffin et al. (1993) Appl Biochem Biotechnol 38:147-159). It will be evident to one skilled in the art that, for certain embodiments, the occurrence of only one, two or three of the nucleic acid bases need be determined in the sequencing reaction. For instance, A-track sequencing or an equivalent, e.g., where only one nucleotide is detected, can be carried out. Other sequencing methods are known (see, e.g., in U.S. Pat. No. 5,580,732 entitled “Method of DNA sequencing employing a mixed DNA-polymer chain probe” and U.S. Pat. No. 5,571,676 entitled “Method for mismatch-directed in vitro DNA sequencing”).

[0589] e. Restriction Enzyme Digest Analysis

[0590] In some cases, the presence of a specific allele in nucleic acid, particularly DNA, from a subject can be shown by restriction enzyme analysis. For example, a specific nucleotide polymorphism can result in a nucleotide sequence containing a restriction site which is absent from the nucleotide sequence of another allelic variant.

[0591] f. Mismatch Cleavage

[0592] Protection from cleavage agents, such as, but not limited to, a nuclease, hydroxylamine or osmium tetroxide and with piperidine, can be used to detect mismatched bases in RNA/RNA DNA/DNA, or RNA/DNA heteroduplexes (Myers, et al. (1985) Science 230:1242). In general, the technique of “mismatch cleavage” starts by providing heteroduplexes formed by hybridizing a control nucleic acid, which is optionally labeled, e.g., RNA or DNA, comprising a nucleotide sequence of an allelic variant with a sample nucleic acid, e.g., RNA or DNA, obtained from a tissue sample. The double-stranded duplexes are treated with an agent, which cleaves single-stranded regions of the duplex such as duplexes formed based on basepair mismatches between the control and sample strands. For instance, RNA/DNA duplexes can be treated with RNase and DNA/DNA hybrids treated with S1 nuclease to enzymatically digest the mismatched regions.

[0593] In other embodiments, either DNA/DNA or RNA/DNA duplexes can be treated with hydroxylamine or osmium tetroxide and with piperidine in order to digest mismatched regions. After digestion of the mismatched regions, the resulting material is then separated by size on denaturing polyacrylamide gels to determine whether the control and sample nucleic acids have an identical nucleotide sequence or in which nucleotides they differ (see, for example, Cotton et al. (1988) Proc. Natl Acad Sci U.S.A. 85:4397; Saleeba et al. (1992) Methods Enzymod. 217:286-295). The control or sample nucleic acid is labeled for detection.

[0594] g. Electrophoretic Mobility Alterations

[0595] In other embodiments, alteration in electrophoretic mobility is used to identify the type of allelic variant of a gene of interest. For example, single-strand conformation polymorphism (SSCP) may be used to detect differences in electrophoretic mobility between mutant and wild type nucleic acids (Orita et al. (1989) Proc. Natl. Acad. Sci. U.S.A. 86:2766, see also Cotton (1993) Mutat Res 285:125-144; and Hayashi (1992) Genet Anal Tech Appl 9:73-79). Single-stranded DNA fragments of sample and control nucleic acids are denatured and allowed to renature. The secondary structure of single-stranded nucleic acids varies according to sequence, the resulting alteration in electrophoretic mobility enables the detection of even a single base change. The DNA fragments may be labeled or detected with labeled probes. The sensitivity of the assay may be enhanced by using RNA (rather than DNA), in which the secondary structure is more sensitive to a change in sequence. In another embodiment, the subject method uses heteroduplex analysis to separate double stranded heteroduplex molecules on the basis of changes in electrophoretic mobility (Keen et al. (1991) Trends Genet 7:5).

[0596] h. Polyacrylamide Gel Electrophoresis

[0597] In yet another embodiment, the identity of an allelic variant of a polymorphic region of an gene is obtained by analyzing the movement of a nucleic acid comprising the polymorphic region in polyacrylamide gels containing a gradient of denaturant is assayed using denaturing gradient gel electrophoresis (DGGE) (Myers et al. (1985) Nature 313:495). When DGGE is used as the method of analysis, DNA will be modified to ensure that it does not completely denature, for example by adding a GC clamp of approximately 40 bp of high-melting GC-rich DNA by PCR. In a further embodiment, a temperature gradient is used in place of a denaturing agent gradient to identify differences in the mobility of control and sample DNA (Rosenbaum and Reissner (1987) Biophys Chem 265:1275).

[0598] i. Oligonucleotide Ligation Assay (OLA)

[0599] In another embodiment, identification of the allelic variant is carried out using an oligonucleotide ligation assay (OLA), as described, e.g., in U.S. Pat. No. 4,998,617 and in Landegren, U. et al. (1988) Science 241:1077-1080. The OLA protocol uses two oligonucleotides which are designed to be capable of hybridizing to abutting sequences of a single strand of a target. One of the oligonucleotides is linked to a separation marker, e.g., biotinylated, and the other is detectably labeled. If the precise complementary sequence is found in a target molecule, the oligonucleotides will hybridize such that their termini abut, and create a ligation substrate. Ligation then permits the labeled oligonucleotide to be recovered using avidin, or another biotin ligand. Nickerson, D. A. et al. have described a nucleic acid detection assay that combines attributes of PCR and OLA (Nickerson, D. A. et al. (1990) Proc. Natl. Acad. Sci. U.S.A. 87:8923-8927). In this method, PCR is used to achieve the exponential amplification of target DNA, which is then detected using OLA.

[0600] Several techniques based on this OLA method have been developed and can be used to detect specific allelic variants of a polymorphic region of a gene. For example, U.S. Pat. No. 5,593,826 discloses an OLA using an oligonucleotide having 3′-amino group and a 5′-phosphorylated oligonucleotide to form a conjugate having a phosphoramidate linkage. In another variation of OLA described in Tobe et al. (1996) Nucl. Acids Res. 24:3728, OLA combined with PCR permits typing of two alleles in a single microtiter well. By marking each of the allele-specific primers with a unique hapten, i.e., digoxigenin and fluorescein, each OLA reaction can be detected by using hapten specific antibodies that are labeled with different enzyme reporters, alkaline phosphatase or horseradish peroxidase. This system permits the detection of the two alleles using a high throughput format that leads to the production of two different colors.

[0601] j. SNP Detection Methods

[0602] Several methods have been developed to facilitate the analysis of single nucleotide polymorphisms.

[0603] In one embodiment, the single base polymorphism can be detected by using a specialized exonuclease-resistant nucleotide, as disclosed, e.g., in Mundy, C. R. (U.S. Pat. No. 4,656,127). According to the method, a primer complementary to the allelic sequence immediately 3′ to the polymorphic site is permitted to hybridize to a target molecule obtained from a particular animal or human. If the polymorphic site on the target molecule contains a nucleotide that is complementary to the particular exonuclease-resistant nucleotide derivative present, then that derivative will be incorporated onto the end of the hybridized primer. Such incorporation renders the primer resistant to exonuclease, and thereby permits its detection. Since the identity of the exonuclease-resistant derivative of the sample is known, a finding that the primer has become resistant to exonucleases reveals that the nucleotide present in the polymorphic site of the target molecule was complementary to that of the nucleotide derivative used in the reaction. This method has the advantage that it does not require the determination of large amounts of extraneous sequence data.

[0604] In another embodiment, a solution-based method for determining the identity of the nucleotide of a polymorphic site is employed (Cohen, D. et al. (French Patent 2,650,840; PCT Application No. WO/91/02087)). As in the Mundy method of U.S. Pat. No. 4,656,127, a primer is employed that is complementary to allelic sequences immediately 3′ to a polymorphic site. The method determines the identity of the nucleotide of that site using labeled dideoxynucleotide derivatives, which, if complementary to the nucleotide of the polymorphic site will become incorporated onto the terminus of the primer.

[0605] k. Genetic Bit Analysis

[0606] An alternative method, known as Genetic Bit Analysis or GBA™ is described by Goelet, et al. (U.S. Pat. No. 6,004,744, PCT Application No. 92/15712). The method of Goelet, et al. uses mixtures of labeled terminators and a primer that is complementary to the sequence 3′ to a polymorphic site. The labeled terminator that is incorporated is thus determined by, and complementary to, the nucleotide present in the polymorphic site of the target molecule being evaluated. In contrast to the method of Cohen et al. (French Patent 2,650,840; PCT Application No. WO/91/02087), the method of Goelet, et al., is preferably a heterogeneous phase assay, in which the primer or the target molecule is immobilized to a solid phase.

[0607] I. Other Primer-Guided Nucleotide Incorporation Procedures

[0608] Other primer-guided nucleotide incorporation procedures for assaying polymorphic sites in DNA have been described (Komher, J. S. et al. (1989) Nucl. Acids Res. 17:7779-7784; Sokolov, B. P. (1990) Nucl. Acids Res. 18:3671; Syvanen, A. C., et al. (1990) Genomics 8:684-692, Kuppuswamy, M. N. et al. (1991) Proc. Natl. Acad. Sci. (U.S.A.) 88:1143-1147; Prezant, T. R. et al. (1992) Hum. Mutat. 1:159-164; Ugozzoli, L. et al. (1992) GATA 9:107-112; Nyren, P. et al. (1993) Anal. Biochem. 208:171-175). These methods differ from GBA™ in that they all rely on the incorporation of labeled deoxynucleotides to discriminate between bases at a polymorphic site. In such a format, since the signal is proportional to the number of deoxynucleotides incorporated, polymorphisms that occur in runs of the same nucleotide can result in signals that are proportional to the length of the run (Syvanen, A. C., et al. (1993) Amer. J. Hum. Genet. 52:46-59).

[0609] For determining the identity of the allelic variant of a polymorphic region located in the coding region of a gene, yet other methods than those described above can be used. For example, identification of an allelic variant which encodes a mutated protein can be performed by using an antibody specifically recognizing the mutant protein in, e.g., immunohistochemistry or immunoprecipitation. Binding assays are known in the art and involve, e.g., obtaining cells from a subject, and performing binding experiments with a labeled lipid, to determine whether binding to the mutated form of the protein differs from binding to the wild-type protein.

[0610] m. Molecular Structure Determination

[0611] If a polymorphic region is located in an exon, either in a coding or non-coding region of the gene, the identity of the allelic variant can be determined by determining the molecular structure of the mRNA, pre-mRNA, or cDNA. The molecular structure can be determined using any of the above described methods for determining the molecular structure of the genomic DNA, e.g., sequencing and single-strand conformation polymorphism.

[0612] n. Mass Spectrometric Methods

[0613] Nucleic acids can also be analyzed by detection methods and protocols, particularly those that rely on mass spectrometry (see, e.g., U.S. Pat. Nos. 5,605,798, 6,043,031, 6,197,498, and International Patent Application No. WO/96/29431, International PCT Application No. WO/98/20019).

[0614] Multiplex methods allow for the simultaneous detection of more than one polymorphic region in a particular gene. This is the preferred method for carrying out haplotype analysis of allelic variants of a gene.

[0615] Multiplexing can be achieved by several different methodologies. For example, several mutations can be simultaneously detected on one target sequence by employing corresponding detector (probe) molecules (e.g., oligonucleotides or oligonucleotide mimetics). Variations in additions to those set forth herein will be apparent to the skilled artisan.

[0616] A different multiplex detection format is one in which differentiation is accomplished by employing different specific capture sequences which are position-specifically immobilized on a flat surface (e.g., a ‘chip array’).

[0617] o. Other Methods

[0618] Additional methods of analyzing nucleic acids include amplification-based methods including polymerase chain reaction (PCR), ligase chain reaction (LCR), mini-PCR, rolling circle amplification, autocatalytic methods, such as those using QJ replicase, TAS, 3SR, and any other suitable method known to those of skill in the art.

[0619] Other methods for analysis and identification and detection of polymorphisms, include but are not limited to, allele specific probes, Southern analyses, and other such analyses.

[0620] 2. Primers, Probes and Antisense Nucleic Acid Molecules

[0621] Provided herein are oligonucleotides, such as, for example, primers, probes and antisense nucleic acid molecules. The probes and primers and antisense molecules are oligonucleotides that specifically hybridize to either strand of an IDE, KNSL1, SNCG, LIPA, TNFRSF6 or PLAU gene, or portion thereof, or surrounding regions of chromosome 10, or a nucleic acid molecule comprising a sequence of nucleotides encoding all or one or more portions of a protein encoded by an IDE, KNSL1, SNCG, LIPA, TNFRSF6 or PLAU gene. The probes, primers, and antisense nucleic acids hybridize adjacent to or at a polymorphic region, typically under conditions of moderate or high stringency.

[0622] Primers refer to nucleic acids which are capable of specifically hybridizing to a nucleic acid sequence which is adjacent to a polymorphic region of interest, or at a polymorphic region, and are extended. A primer can be used alone in a detection method, or a primer can be used together with at least one other primer or probe in a detection method. Primers can also be used to amplify at least a portion of a nucleic acid. For amplifying at least a portion of a nucleic acid, a forward primer (i.e., 5′ primer) and a reverse primer (i.e., 3′ primer) will preferably be used. Forward and reverse primers hybridize to complementary stands of a double stranded nucleic acid, such that upon extension from each primer, a double stranded nucleic acid is amplified.

[0623] Probes refer to nucleic acids which hybridize to the region of interest and which are not further extended. For example, a probe is a nucleic acid which hybridizes adjacent to or at a polymorphic region of a gene of interest on chromosome 10 and which by hybridization or absence of hybridization to the DNA of a subject will be indicative of the identity of the allelic variant of the polymorphic region of the gene. Preferred probes have a number of nucleotides sufficient to allow specific hybridization to the target nucleotide sequence. Where the target nucleotide sequence is present in a large fragment of DNA, such as a genomic DNA fragment of several tens or hundreds of kilobases, the size of a probe may have to be longer to provide sufficiently specific hybridization, as compared to a probe which is used to detect a target sequence which is present in a shorter fragment of DNA. For example, in some diagnostic methods, a portion of a gene may first be amplified and thus isolated from the rest of the chromosomal DNA and then hybridized to a probe. In such a situation, a shorter probe will likely provide sufficient specificity of hybridization. For example, a probe having a nucleotide sequence of about 10 nucleotides may be sufficient.

[0624] Primers and probes (RNA, DNA (single-stranded or double-stranded), PNA and their analogs) described herein may be labeled with any detectable reporter or signal moiety including, but not limited to radioisotopes, enzymes, antigens, antibodies, spectrophotometric reagents, chemiluminescent reagents, fluorescent and any other light producing chemicals. Additionally, these probes may be modified without changing the substance of their purpose by terminal addition of nucleotides designed to incorporate restriction sites or other useful sequences, proteins, signal generating ligands such as acridinium esters, and/or paramagnetic particles.

[0625] These probes may also be modified by the addition of a capture moiety (including, but not limited to para-magnetic particles, biotin, fluorescein, dioxigenin, antigens, antibodies) or attached to the walls of microtiter trays to assist in the solid phase capture and purification of these probes and any DNA or RNA hybridized to these probes. Fluorescein may be used as a signal moiety as well as a capture moiety, the latter by interacting with an anti-fluorescein antibody.

[0626] Any probe, primer or antisense molecule can be prepared according to methods well known in the art and described, e.g., in Sambrook, J. Fritsch, E. F., and Maniatis, T. (1989) “Molecular Cloning: A Laboratory Manual,” 2d ed., Cold Spring Harbor Laboratory Press (Cold Spring Harbor, N.Y.) For example, discrete fragments of the DNA can be prepared and cloned using restriction enzymes. Alternatively, probes and primers can be prepared using the Polymerase Chain Reaction (PCR) using primers having an appropriate sequence.

[0627] Oligonucleotides may be synthesized by standard methods known in the art, e.g., by use of an automated DNA synthesizer (such as are commercially available from Biosearch (Novato, Calif.); Applied Biosystems (Foster City, Calif.) and other methods). As examples, phosphorothioate oligonucleotides may be synthesized by the method of Stein et al. (1988) Nucl. Acids Res. 16:3209, methylphosphonate oligonucleotides, for example, can be prepared by use of controlled pore glass polymer supports (Sarin et al. (1988) Proc. Natl. Acad. Sci. (U.S.A.) 85:7448-7451).

[0628] Suitable primers for the detection of a human polymorphism in these genes can be readily designed using currently available sequence information and standard techniques known in the art for the design and optimization of primers sequences. Optimal design of such primer sequences can be achieved, for example, by the use of commercially available primer selection programs such as Primer 2.1, Primer 3 (http://www.hgmp.mrc.ac.uk/GenomeWeb/nuc-primer.html) or GeneFisher (http://genefisher.de/).

[0629] Isolated nucleic acids, antisense nucleic acids, probes and primers provided herein and used, e.g., in the methods of detecting allelic variants of a gene of interest are of sufficient length to specifically hybridize to portions of the gene at polymorphic sites. Typically such lengths depend upon the complexity of the source organism genome. For humans such lengths are at least 14, 15, 16, 17, 18 or 19 nucleotides, and typically may be at least 20, 30, 40, 50, 60, 70, 80, 90, 100, 200, 300, 400 or 500 or more nucleotides. In other embodiments, such lengths of the probes and primers provided are not more than 14, 15, 16, 17, 18 or 19 nucleotides, and further may be not more than 20, 30, 40, 50, 60, 70, 80, 90, 100, 200, 300, 400, 500, 600, 700, 800, 900 or 1000 nucleotides in length.

[0630] For the methods of detecting polymorphisms in the human SNCG gene provided herein, probes and primers include the following: a sequence of nucleotides that specifically hybridizes adjacent to or at a polymorphic region of a SNCG allele, or the complement thereof, spanning a nucleotide position of SEQ ID NO: 73, selected from nucleotide positions 560, 590, 617, 645, 915, 987, 1723, 1943, 1950, 3151, 3178, 3189, 3284, 3779, 4156, 4276, 4311, 4552, 4976, 4995, 5019, 5025, 5112, 5136, 5517, 5421, 5648, 2533, 3371, 4627, 4727, 4813 and 5200. In a particular embodiment, the nucleotide at position 560 is G or A, at position 590 is A or C, at position 617 is C or T, at position 645 is G or A, at position 915 is T or G, at position 987 is C or A, at position 1723 is A or G, at position 1943 is G or C, at position 1950 is G or A, at position 3151 is A or G, at position 3178 is T or C, at position 3189 is T or C, at position 3284 is G or A, at position 3779 is T or position 3779 is deleted, at position 4156 corresponds to a single nucleotide G that is either inserted or not inserted, at position 4276 is T or A, at position 4311 is C or T, at position 4552 is T or A, at position 4976 is C or position 4976 is deleted, at position 4995 is C or G, at position 5019 is C or T, at position 5025 is C or A, at position 5112 is T or A, at position 5136 is T or A, at position 5517 is T or C, at position 2533 is T or G, at position 3371 is A or C, at position 4627 is T or G, at position 4727 is A or G, at position 4813 is A or C, and at position 5200 is G or C.

[0631] For the methods of detecting polymorphisms in the human IDE gene provided herein, probes and primers include the following: a sequence of nucleotides that specifically hybridizes adjacent to or at a polymorphic region of an IDE allele, or the complement thereof, spanning a nucleotide position of SEQ ID NO: 187 selected from nucleotide positions 2456, 3279, 3407, 42943, 62498, 69586, 107395, 112114, 116662, 17095, 17242, 33590, 38903, 43391, 45017, 68906, 68973, 73772, 74084, 83024, 83104, 89301, 105060, 108489, 111914, 113142, 113591, 114683, 117803 and 124565; or and IDE allele spanning a nucleotide position of SEQ ID NO: 484, or the complement thereof, selected from the group consisting of nucleotide positions 820, 7066, 11758, 21270, 22225, 29294, 33452, 33708, 36982, 54862, 77786, 80594, 84792, 84997, 86682, 86857, 88511, 90437, 90593, 91650, 91870, 91878, 92011, 93618, 94344, 94714, 95671, 96324, 97302, 97370, 98253, 98276, 98385, 98646, 98814, 99597, 100378, 101029, 101265, 102465, 103289, 103967, 105793, 106076, 106453, 106600, 106995, 107851, 108434, 109096, 109399, 109483, 110870, 111189, 111972, 112627, 112629, 112631, 113407, 114444, 114482,115473,116681, 117226, 117600, 117802, 118223, 120011, 122260, 123165, 123424, 124352, 124501, 124692, 125113, 125159, 126568, 127166, 127598, 127600, 127609, 127614, 127623, 127662, 128053, 128261, 128289, 128291, 128393, and 129444. In a particular embodiment, the nucleotide in SEQ ID NO: 187 at position 2456 is T or G, at position 3279 is T or C, at position 3407 is C or T, at position 42943 is T or C, at position 62498 is T or C, at position 69586 is T or C, at position 107395 is G or A, at position 112114 is G or A, and at position 116662 is T or A and/or the complementary nucleotide(s) in SEQ ID NO: 484: at position 820 is A or T, at position 7066 is A or G, at position 11758 is T or C, at position 21270 is T or G, at position 22225 is A or T, at position 29294 is C or T, at position 33452 is G or T, at position 33708 is G or A, at position 36982 is C or T, at position 54862 is A or G, at position 77786 is C or A, at position 80594 is G or A, at position 84792 is T or C, at position 84997 is G or T, at position 86682 is C or T, at position 86857 is T or A, at position 88511 is A or G, at position 90437 is G or T, at position 90593 is G or A, at position 91650 is T or C, at position 91870 is G or A, at position 91878 is G or A, at position 92011 is C or T, at position 93618 is T or C, at position 94344 is C or T, at position 94714 is A or G, at position 95671 is A or G, at position 96324 is A or G, at position 97302 is G or A, at position 97370 is G or A, at position 98253 is T or C, at position 98276 is C or T, at position 98385 is A or G, at position 98646 is T or A, at position 98814 is G or A, at position 99597 is C or T, at position 100378 is T or C, at position 101029 is G or A, at position 101265 is C or T, at position 102465 is C or G, at position 103289 is T or G, at position 103967 is C or T, at position 105793 is A or G, at position 106076 is G or T, at position 106453 is C or T, at position 106600 is A or G, at position 106995 is G or A, at position 107851 is C or T, at position 108434 is G or C, at position 109096 is C or T, at position 109399 is C or T, at position 109483 is T or G, at position 110870 is G or A, at position 111189 is A or G, at position 111972 is G or A, at position 112627 is A or T, at position 112629 is A or T, at position 112631 is T or A, at position 113407 is C or G, at position 114444 is C or G, at position 114482 is G or C, at position 115473 is C or position 115473 is deleted, at position 116681 is G or T, at position 117226 is A or T, at position 117600 is A or G, at position 117802 is C or T, at position 118223 is G or C, at position 120011 is C or T, at position 122260 is A or G, at position 123165 is A or G, at position 123424 is G or A, at position 124352 is A or G, at position 124501 is C or T, at position 124692 is A or G, at position 125113 is T or A, at position 125159 is G or A, at position 126568 is G or C, at position 127166 is C or G, at position 127598 is T or C, at position 127600 is T or C, at position 127609 is T or C, at position 127614 is T or C, at position 127623 is T or C, at position 127662 is G or A, at position 128053 is G or A, at position 128261 is a repeat of -TAAA- occurring 6, 7, or 8 times beginning at position 128261, at position 128289 is A or T, at position 128291 is T or G, at position 128393 is T or G, at position 129444 is C or T.

[0632] For the methods of detecting polymorphisms in the human KNSL1 gene provided herein, probes and primers include the following: a sequence of nucleotides that specifically hybridizes adjacent to or at a polymorphic region of a KNSL1 allele, or the complement thereof, spanning a nucleotide position of SEQ ID NO: 348 selected from nucleotide positions 300, 1152, 14235, 15104, 20815, 35719, 36738-36739, 41015, 42125, 45083, 45887, 56706, 56887, 58524, 62661 and 63802; or a KNSL1 allele spanning a nucleotide position of SEQ ID NO: 484, or the complement thereof, selected from the group consisting of nucleotide positions 130876, 131378, 131616, 131620, 131688, 131998, 132004, 132370, 132697, 132968, 133355, 133806, 134030, 134291, 134661, 137087, 137142, 138396, 140665, 140736, 141173, 142056, 142777, 143025, 143729, 144484, 146181, 147051, 147322, 147707, 147842, 148080, 149026, 149044, 149389, 150003, 150384, 150454, 150686, 151343, 151961, 152119, 153791, 154328, 154513, 154639, 155049, 155114, 158040, 158895, 191284, 192272, 192698, and 193706. In a particular embodiment, the nucleotide(s) at position 300 corresponds to a dinucleotide -CA- that is either inserted or not inserted beginning at position 300, at position 1152 is G or T, at position 14235 corresponds to a single nucleotide T that is either inserted or not inserted, at position 15104 is A or G, at position 20815 is T or C, at position 35719 is T or C, at positions 36738-36739 is a dinucleotide corresponding to CA or AC, at position 41015 corresponds to the oligonucleotide -AATTT- that is either inserted or not inserted beginning at position 41015, at position 42125 is T or G, at position 45083 is C or T, at position 45887 is G or C, at position 56706 is C or T, at position 56887 is A or G, at position 58524 is C or T, at position 62661 is C or T, and at position 63802 is A or C; and/or the nucleotide(s) in SEQ ID NO: 484: at position 1 30876 is T or C, at position 131378 is G or A, at position 131616 is G or A, at position 131620 is G or A, at position 131688 is T or G, at positions 131998-131203 are CTTTTC- or positions 131998-131203 are deleted, at position 132004 is either a 9, 16, 21, 26, or 29 base pair poly-T repeat beginning at nucleotide 132004, at position 132370 is A or G, at position 132697 is A or G, at position 132968 is C or T, at position 133355 is either a 6, 7 or 8 base pair poly-T repeat beginning at nucleotide 133355, at position 133806 is T or G, at position 134030 is G or A, at position 134291 is A or G, at position 134661 is G or A, at position 137087 is A or G, at position 137142 is G or A, at position 138396 is C or T, at position 140665 is T or G, at position 140736 is A or G, at position 141173 is A or G, at position 142056 is T or C, at position 142777 corresponds to a dinucleotide -AG- that is either inserted or not inserted beginning at position 142777, at position 143025 is G or T, at position 143729 is C or A, at position 144484 is T or A, at position 146181 is T or A, at position 147051 is G or A, at position 147322 is C or T, at position 147707 is G or T, at positions 147842-147845 are -AGTT- or positions 147842-147845 are deleted, at position 148080 is C or T, at position 149026 is either a 17, 18, 19 or 22 base pair -AC- repeat beginning at nucleotide 149026, at position 149044 is either a 22, 24, 28, 30, 32 or 36 base pair -GT- repeat beginning at nucleotide 149044, at position 149389 is A or G, at position 150003 is G or A, at position 150384 is G or T, at position 150454 is C or T, at position 150686 is G or T, at position 151343 is C or T, at position 151961 is C or T, at position 152119 is C or T, at position 153791 is C or G, at position 154328 is A or T, at position 154513 is C or A, at position 154639 is G or A, at position 155049 is T or C, at position 155114 is T or C, at position 158040 is C or A, at position 158895 is G or A, at position 191284 is C or T, at position 192272 is C or T, at position 192698 is A or T, at position 193706 is T or A.

[0633] For the methods of detecting polymorphisms in the human TNFRSF6 genes provided herein, probes and primers include the following: a sequence of nucleotides that specifically hybridizes adjacent to or at a polymorphic region of a TNFRSF6 allele or the complement thereof spanning a position corresponding to a position of SEQ ID NO: 403 selected from the group consisting of positions 1530, 1550, 14525, 14714, 18982, 19069, 20412, 20552, 23199, 23416, 24890, 26359, 199, 213, 843, 2967, 3103, 5335, 5345, 6074, 9374, 9907, 9936, 10937, 11200, 11279, 11359, 11503, 11511, 11587, 11694, 11905, 12193, 12208, 12238, 18511, 18567, 20640, 21585, 22439, 25081, 26878, 27670, 1926, 2269, 18934, 19227 and 22026. In a particular embodiment, the nucleotide at position 1530 is T or C, at position 1550 is A or G, at position 14525 is G or A, at position 14714 is C or T, at position 18982 is G or C, at position 19069 is A or G, at position 20412 is A or G, at position 20552 is A or G, at position 23199 is G or A, at position 23416 is T or C, at position 24890 is A or G, at position 26359 is A or T, at position 1926 is G or A, at position 2269 is G or A, at position 18934 is C or T, at position 19227 is C or T, and at position 22026 is C or G.

[0634] For the methods of detecting polymorphisms in the human LIPA genes provided herein, probes and primers include the following: a sequence of nucleotides that specifically hybridizes adjacent to or at a polymorphic region of a LIPA allele or the complement thereof spanning a position corresponding to a position of SEQ ID NO: 468 selected from the group consisting of positions 1197, 1307-1309, 1841, 1852, 2075, 6063, 6173, 6194, 7820, 25283, 28453-28465, 28543, 28746, 29904, 37861, 39834, 40018, 7219, 8242, 10114, 10606, 10688, 10729, 11559, 12031, 14497, 14729, 21145, 21329, 21404, 21429, 22246, 22354, 22621, 23802 and 25969. In a particular embodiment, the nucleotide at position 1197 is C or G, at positions 1307-1309 are ATC or positions 1307-1309 are deleted, at position 1841 is A or C, at position 1852 is G or A, at position 2075 is G or A, at position 6063 is G or T, at position 6173 is A or C, at position 6194 is G or A, at position 7820 is C or G, at position 25283 is G or C, at positions 28453-28465 are -TCCGCGAGAGGGC- or positions 28453-28465 are deleted, at position 28543 is C or T, at position 28746 is A or C, at position 29904 is G or A, at position 37861 is C or T, at position 39834 is T or A, and at position 40018 is C or T.

[0635] For the methods of detecting polymorphisms in the human uPA (PLAU) gene provided herein, probes and primers include the following: a sequence of nucleotides that specifically hybridizes adjacent to or at a polymorphic region of a uPA allele or the complement thereof spanning a position corresponding to a position of SEQ ID NOS: 559 or 560 selected from the group consisting of positions 9, 401, 464, 515, 748, 1229, 1356, 1752, 1942, 2127, 2543, 3029, 3169, 3799, 3947, 4808, 5287, 6532, 178, 1363, 1423, 1465, 1540, 2297, 2445, 2653, 3080, 3546, 3664, 3816, 4320, 4369, 4399, 4851, 5186, 5204, 5787, 6519, 6909, 7235, 7848, 7908, and the complementary positions thereof; and positions of SEQ ID NO: 563 consisting of 79, 93, 256, 385 and 714, and the complementary positions thereof. In particular embodiments, the nucleotide(s) in SEQ ID NOS: 559 or 560: at position 9 is A or C, at position 401 is G or A, at position 464 is G or position 464 is deleted, at position 515 is C or T, at position 748 is G or T, at position 1229 is T or G, at position 1356 is C or T, at position 1752 is T or C, at position 1942 is G or A, at position 2127 is G or A, at position 2543 is G or A, at position 3029 is G or A, at position 3169 is C or T, at position 3799 is T or C, at position 3947 is C or T, at position 4808 is C or T, at position 5287 is T or C, and at position 6532 is T or C, and the complements thereof; and the nucleotide in SEQ ID NO: 563: at position 79 is T or C, at position 93 is a C or position 93 is deleted, at position 256 is G or T, at position 385 is C or T, at position 714-715 is the dinulceotide -GT- or the -GT- dinucleotide is deleted.

[0636] Antisense compounds may be conveniently and routinely made through the well-known technique of solid phase synthesis. Equipment for such synthesis is sold by several vendors including, for example, Applied Biosystems (Foster City, Calif.). Any other means for such synthesis known in the art may additionally or alternatively be employed. It is well known to use similar techniques to prepare oligonucleotides such as the phosphorothioates and alkylated derivatives.

[0637] Antisense compounds are typically 8 to 30 nucleotides in length complementary to and targeted to a nucleic acid molecule and modulates its expression. The targeted nucleic acid molecule represents the coding strand. For example, an antisense compound is an antisense oligonucleotide which comprises the complement of at least an 8 nucleotide segment of the SNCG gene (SEQ ID NO: 73) or RNA (SEQ ID NO: 469); an 8 nucleotide segment of the IDE gene (SEQ ID NO: 187) or RNA (SEQ ID NO: 470); an 8 nucleotide segment of the KNSL1 gene (SEQ ID NO: 348) or RNA (SEQ ID NO: 471, SEQ ID NO: 473 or SEQ ID NO: 475); an 8 nucleotide segment of the TNFRSF6 gene (SEQ ID NO: 403) or RNA (SEQ ID NO: 477 through SEQ ID NO: 481); an 8 nucleotide segment of the LIPA gene (SEQ ID NO: 468) or RNA (SEQ ID NO: 482).

[0638] In a particular embodiment, antisense compounds provided herein, comprise the complement of at least an 8 nucleotide segment of a cDNA encoding a polymorphic SNCG protein comprising the coding region or full-length of SEQ ID NO: 469 having variant nucleotides corresponding to positions: 30, 57, 85, 243, 250, 377, 512, 531, 555, 561 and 672 of SEQ ID NO: 469. In a particular embodiment, an antisense compound provided herein comprises the complement of at least an 8 nucleotide segment of SEQ ID NO: 469, wherein the nucleotide at position 672 of SEQ ID NO: 469 is not T. In another embodiment, the nucleotide at position 672 of SEQ ID NO: 469 is A.

[0639] Also provided herein are antisense compounds comprising the complement of at least an 8 nucleotide segment of cDNAs encoding IDE protein comprising the coding region or full-length of SEQ ID NO: 470 having a variant nucleotide corresponding to position 7 of SEQ ID NO: 470, wherein the nucleotide at position 7 is not C. In a particular embodiment, the nucleotide at position 7 of SEQ ID NO: 470 is T.

[0640] Also provided herein are antisense compounds comprising the complement of at least an 8 nucleotide segment of cDNAs encoding a polymorphic KNSL1 protein comprising the coding region or full-length of: SEQ ID NO: 471 having a variant nucleotide at position 2747 of SEQ ID NO: 471; SEQ ID NO: 473 having a variant nucleotide at position 2610 of SEQ ID NO: 473; SEQ ID NO: 475 having a variant nucleotide at position 2695 of SEQ ID NO: 475, wherein the variant nucleotide at each of these positions is not C. In a particular embodiment, the nucleotide at position 2747 of SEQ ID NO: 471, at position 2610 of SEQ ID NO: 473, and at position 2695 of SEQ ID NO: 475 is T.

[0641] Also provided herein are antisense compounds comprising the complement of at least an 8 nucleotide segment of cDNAs encoding a polymorphic TNFRSF6 protein comprising the coding region or full-length of SEQ ID NO: 477 having variant nucleotides corresponding to positions 208 and 420 of SEQ ID NO: 477. In a particular embodiment, an antisense compound provided herein comprises the complement of at least an 8 nucleotide segment of SEQ ID NO: 477, wherein the nucleotide at position 208 is not G. In another embodiment, the nucleotide at position 208 of SEQ ID NO: 477 is A.

[0642] Also provide herein are antisense compounds comprising the complement of at least an 8 nucleotide segment of cDNAs encoding TNFRSF6 protein comprising the coding region or full-length of SEQ ID NO: 478 having variant nucleotides corresponding to positions 377, 416, 836 and 1766 of SEQ ID NO: 478. In a particular embodiment, an antisense compound provided herein comprises the complement of at least an 8 nucleotide segment of SEQ ID NO: 478, wherein the nucleotide at position 377 is not G. In another embodiment, the nucleotide at position 377 of SEQ ID NO: 478 is A.

[0643] Also provide herein are antisense compounds comprising the complement of at least an 8 nucleotide segment of cDNAs encoding TNFRSF6 protein comprising the coding region or full-length of SEQ ID NO: 479 having variant nucleotides corresponding to positions 403, 442, 862 and 1792 of SEQ ID NO: 479. In a particular embodiment, an antisense compound provided herein comprises the complement of at least an 8 nucleotide segment of SEQ ID NO: 479, wherein the nucleotide at position 403 is not G. In another embodiment, the nucleotide at position 403 of SEQ ID NO: 479 is A.

[0644] Also provide herein are antisense compounds comprising the complement of at least an 8 nucleotide segment of cDNAs encoding TNFRSF6 protein comprising the coding region or full-length of SEQ ID NO: 480 having variant nucleotides corresponding to positions 208, 247 and 604 of SEQ ID NO: 480. In a particular embodiment, an antisense compound provided herein comprises the complement of at least an 8 nucleotide segment of SEQ ID NO: 480, wherein the nucleotide at position 208 is not G. In another embodiment, the nucleotide at position 208 of SEQ ID NO: 480 is A.

[0645] Also provide herein are antisense compounds comprising the complement of at least an 8 nucleotide segment of cDNAs encoding TNFRSF6 protein comprising the coding region or full-length of SEQ ID NO: 481 having variant nucleotides corresponding to positions 208 and 247 of SEQ ID NO: 481. In a particular embodiment, an antisense compound provided herein comprises the complement of at least an 8 nucleotide segment of SEQ ID NO: 481, wherein the nucleotide at position 208 is not G. In another embodiment, the nucleotide at position 208 of SEQ ID NO: 481 is A.

[0646] Also provided herein are antisense compounds comprising the complement of at least an 8 nucleotide segment of cDNAs encoding a polymorphic LIPA protein comprising the coding region or full-length of SEQ ID NO: 482 having variant nucleotides corresponding to positions: 86, 107, 2149, and 2333 of SEQ ID NO: 482. In a particular embodiment, an antisense compound provided herein comprises the complement of at least an 8 nucleotide segment of SEQ ID NO:482, wherein the nucleotide at position 2333 of SEQ ID NO: 482 is not C. In another embodiment, the nucleotide at position 2333 of SEQ ID NO: 482 is T.

[0647] An antisense compound can contain at least one modified nucleotide which can confer nuclease resistance or increase the binding of the antisense compound with the target nucleotide. The antisense compound can contain at least one internucleoside linkage wherein the modified internucleoside linkage of the antisense oligonucleotide can be a phosphorothioate linkage, a morpholino linkage or a peptide-nucleic acid linkage. Representative United States patents that teach the preparation of the above oligonucleosides include, but are not limited to, U.S. Pat. Nos.: 5,034,506; 5,166,315; 5,185,444; 5,214,134; 5,216,141; 5,235,033; 5,264,562; 5,264,564; 5,405,938; 5,434,257; 5,466,677; 5,470,967; 5,489,677; 5,541,307; 5,561,225; 5,596,086; 5,602,240; 5,610,289; 5,602,240; 5,608,046; 5,610,289; 5,618,704; 5,623,070; 5,663,312; 5,633,360; 5,677,437; and 5,677,439, each of which is herein incorporated by reference.

[0648] An antisense compound can contain at least one least one modified sugar moiety wherein the modified sugar moiety of the antisense oligonucleotide is a 2′-O-methoxyethyl sugar moiety or a 2′-dimethylaminooxyethoxy sugar moiety. Modified oligonucleotides may also contain one or more substituted sugar moieties. Representative United States patents that teach the reparation of such modified sugar structures include, but are not limited to, U.S. Pat. Nos.: 4,981,957; 5,118,800; 5,319,080; 5,359,044; 5,393,878; 5,446,137; 5,466,786; 5,514,785; 5,519,134; 5,567,811; 5,576,427; 5,591,722; 5,597,909; 5,610,300; 5,627,0531 5,639,873; 5,646,265; 5,658,873; 5,670,633; and 5,700,920, each of which is herein incorporated by reference.

[0649] An antisense compound can contain at least one modified nucleobase. Oligonucleotides may also include nucleobase (often referred to in the art simply as “base”) modifications or substitutions. As used herein, “unmodified” or “natural” nucleobases include the purine bases adenine (A) and guanine (G), and the pyrimidine bases thymine (T), cytosine (C) and uracil (U). Modified nucleobases include other synthetic and natural nucleobases such as 5-methylcytosine (5-me-C), 5-hydroxymethyl cytosine, xanthine, hypoxanthine, 2-aminoadenine, 6-methyl and other alkyl derivatives of adenine and guanine, 2-propyl and other alkyl derivatives of adenine and guanine, 2-thiouracil, 2-thiothymine and 2-thiocytosine, 5-halouracil and cytosine, 5-propynyl uracil and cytosine, 6-azo uracil, cytosine and thymine, 5-uracil (pseudouracil), 4-thiouracil, 8-halo, 8-amino, 8-thiol, 8-thioalkyl, 8-hydroxyl and other 8-substituted adenines and guanines, 5-halo particularly 5-bromo, 5-trifluoromethyl and other 5-substituted uracils and cytosines, 7-methylguanine and 7-methyladenine, 8-azaguanine and 8-azaadenine, 7-deazaguanine and 7-deazaadenine and 3-deazaguanine and 3-deazaadenine.

[0650] Further nucleobases include those disclosed in U.S. Pat. No. 3,687,808, those disclosed in Kroschwitz, J. (1990) “The Concise Encyclopedia Of Polymer Science And Engineering,” John Wiley & Sons I. ed. 858-859, those disclosed by Englisch et al. (1991) Angewandte Chemie, I ed. 30:613, and those disclosed by Sanghvi, Y. S., Crooke, S. T., and Lebleu, (1993) “Antisense Research and Applications,” CRC Press, B. eds. 289-302 (Boca Raton). Certain of these nucleobases are particularly useful for increasing the binding affinity of the oligomeric compounds of the invention. These include 5-substituted pyrimidines, 6-azapyrimidines and N-2, N-6 and O-6 substituted purines, including 2-aminopropyl-adenine, 5-propynyluracil and 5-propynylcytosine. 5-methylcytosine substitutions have been shown to increase nucleic acid duplex stability by 0.6-1.2° C. (Sanghvi, Y. S., Crooke, S. T. and Lebleu (1993) “Antisense Research and Applications,” CRC Press, B. eds. 276-278 (Boca Raton)) and are presently preferred base substitutions, even more particularly when combined with 2′-O-methoxyethyl sugar modifications.

[0651] The antisense compound can be a chimeric oligonucleotide. Chimeric antisense compounds may be formed as composite structures of two or more oligonucleotides, modified oligonucleotides, oligonucleosides and/or oligonucleotide mimetics as described above. Such compounds have also been referred to in the art as hybrids or gapmers. Representative United States patents that teach the preparation of such hybrid structures include, but are not limited to, U.S. Pat. Nos.: 5,013,830; 5,149,797; 5,220,007; 5,256,775; 5,366,878; 5,403,711; 5,491,133; 5,565,350; 5,623,065; 5,652,355; 5,652,356; and 5,700,922, each of which is herein incorporated by reference.

[0652] N. Transgenic Animals

[0653] Provided herein are transgenic animals, and in particular, non-human transgenic animals, containing, as at least one transgenic element, a uPA, SNCG, IDE, KNSL1, TNFRSF6 and LIPA gene or a portion or portions thereof, such as, for example, a transcriptional control region (including, for example, a promoter and 3′ untranslated (UTR) sequences) and/or a coding sequence of a uPA, SNCG, IDE, KNSL1, TNFRSF6 and LIPA gene. The uPA, SNCG, IDE, KNSL1, TNFRSF6 and LIPA gene or portion(s) thereof contains at least one polymorphic region and is thus referred to as a polymorphic uPA, SNCG, IDE, KNSL1, TNFRSF6 and LIPA gene or portion(s) thereof. A “uPA, SNCG, IDE, KNSL1, TNFRSF6 and LIPA gene or a portion or portions thereof” includes a uPA, SNCG, IDE, KNSL1, TNFRSF6 and LIPA cDNA or portion(s) thereof. In particular embodiments, the polymorphic uPA, SNCG, IDE, KNSL1, TNFRSF6 and LIPA gene is a human polymorphic uPA, SNCG, IDE, KNSL1, TNFRSF6 and LIPA gene. In further particular embodiments, the transgenic animal is a mammal, including, but not limited to rabbits, guinea pigs, cows, pigs, goats, sheep, horses, non-human primates (e.g., baboons, monkeys and chimpanzees) and particularly rodents, including rats and mice. In other embodiments, the animal is an insect, such as, for example, Drosophila. Transgenic animals provided herein may be used for numerous purposes. For example, the animals may be used in testing polymorphic uPA, SNCG, IDE, KNSL1, TNFRSF6 and LIPA genes or portion(s) thereof for characterization of phenotypic outcomes correlated with the particular polymorphisms. The transgenic animals may be used as models for disorders and diseases that involve altered uPA, SNCG, IDE, KNSL1, TNFRSF6 and LIPA gene and/or protein expression or function. Transgenic rodents, such as mice, are particularly well-suited for use as disease models. Transgenic animals containing polymorphic uPA, SNCG, IDE, KNSL1, TNFRSF6 and LIPA genes or portion(s) thereof may also be used in methods of identifying agents that modulate uPA, SNCG, IDE, KNSL1, TNFRSF6 and LIPA expression and/or activity or that modulate a biological event characteristic of a disease or disorder involving altered uPA, SNCG, IDE, KNSL1, TNFRSF6 and LIPA gene and/or protein expression or function which may be candidate treatments for the disease or disorder.

[0654] Also provided herein are methods of producing transgenic animals by introducing a polymorphic uPA, SNCG, IDE, KNSL1, TNFRSF6 and LIPA gene or portion(s) thereof into a cell and allowing the cell to develop into a transgenic animal. The cell may be any cell that may be used in the generation of a transgenic animal. Such cells are known to those of skill in the art of transgenic animal production. For example, the cell may be an embryo, zygote, oocyte, fertilized oocyte or embryonic stem cell, such as, for example, a mouse embryonic stem cell. Numerous techniques for introduction of exogenous nucleic acids into cells that will be allowed to develop into transgenic animals are also known to those of skill in the art. Such techniques include, but are not limited to, pronuclear microinjection (see, e.g., U.S. Pat. No. 4,873,191), retrovirus-mediated gene transfer into germ lines [see, e.g., Van der Putten et al. (1985) Proc. Natl. Acad. Sci. U.S.A. 82:6148-6152], gene targeting into embryonic stem cells [see, e.g., Thompson et al. (1989) Cell 56:313-321], electroporation of embryos [see, e.g., Lo (1983) Mol. Cell. Biol. 3:1803-1814], and sperm-mediated gene transfer [see, e.g., Lavitrano et al. (1989) Cell 57:717-723] [for a review of such techniques, see Gordon (1989) Int. Rev. Cytol. 115:171-229]. A cell into which exogenous nucleic acid has been transferred may be introduced into a recipient female animal for development into a transgenic animal containing the exogenous nucleic acid.

[0655] Methods for making transgenic animals using a variety of transgenes have been described [see, e.g., Wagner et al. (1981) Proc. Nat. Acad. Sc. U.S.A. 78:5016; Stewart et al. (1982) Science 217:1046; Constantini et al. (1981) Nature 294:92; Lacy et al. (1983) Cell 34:343; McKnight et al. (1983) Cell 34:335; Brinstar et al. (1983) Nature 306:332; Palmiter et al. (1982) Nature 300:611; Palmiter et al. (1982) Cell 29:701, and Palmiter et al. (1983) Science 222:809; Ono et al. (2001) Reproduction 122:731-736; Reggio et al. (2001) Biol. Reprod. 65:1528-1533; Park et al. (2001) Animal Reprod. Sci. 68:111-120; Zakhartchenko et al. (2001) Mol. Reprod. Dev. 60:362-369; Arat et al. (2001) Mol. Reprod. Dev. 60:20-26; Koo et al. (2001) Mol. Reprod. Dev. 58:15-20; Polejaeva and Campbell (2000) Theriogenology 53:117-126]. Such methods are also described in U.S. Pat. Nos. 6,175,057; 6,180,849 and 6,133,502, 6,271,436, 6,258,998, 6,103,523, 6,252,133. The term “transgene” is used herein to describe genetic material that has been or is about to be artificially inserted into a cell, particularly an animal cell. For example, the cell may be a mammalian cell, and may be a cell of a living animal. The transgene is used to transform a cell, meaning that a permanent or transient genetic change, is induced in a cell following incorporation of exogenous nucleic acid. A permanent genetic change may be achieved, for example, by introduction of the nucleic acid into the genome of the cell. Vectors for stable integration include, but are not limited to, plasmids, retroviruses and other animal viruses and YACS. Transgenic animals contain an exogenous nucleic acid sequence present as an extrachromosomal element or stably integrated in all or a portion of their cells, especially germ cells. In particular embodiments of the transgenic animals provided herein, the animal stably contains exogenous nucleic acid, e.g., a transgene, in its germ cells for transmission through the germline.

[0656] A transgenic animal that contains a transgene in only some, but not all, of its cells is generally referred to as “chimeric.” During the initial construction of a transgenic animal, “chimeras” or “chimeric animals” may be generated. Chimeras are primarily used for breeding purposes in order to generate the desired transgenic animal. Transgenic animals having a heterozygous alteration are generated by breeding of chimeras. Male and female heterozygotes are typically bred to generate homozygous animals.

[0657] In general methods of generating a transgenic animal, the exogenous nucleic acid, e.g., transgene, is usually either from a different species than the animal host, or is altered in its coding or non-coding sequence relative to a wild-type or reference nucleic acid. The introduced nucleic acid may be a wild-type gene or portion(s) thereof, a naturally occurring polymorphism or a genetically manipulated sequence, for example having deletions, substitutions or insertions in the coding or non-coding regions. When the introduced nucleic acid contains a coding sequence, it is usually operably linked to a promoter, which may be constitutive or inducible, and other regulatory sequences that may be required for expression in the host animal.

[0658] Nucleic acids for use in generating transgenic animals provided herein are nucleic acids containing one or more polymorphic regions of a uPA, SNCG, IDE, KNSL1, TNFRSF6 and LIPA gene and particular polymorphisms thereof, such as particular uPA, SNCG, IDE, KNSL1, TNFRSF6 and LIPA gene alleles. In particular embodiments, the nucleic acid used in generating a transgenic animal contains a human uPA, SNCG, IDE, KNSL1, TNFRSF6 and LIPA gene or portion(s) thereof containing at least one polymorphic region. Of particular interest are variants of a uPA, SNCG, IDE, KNSL1, TNFRSF6 and LIPA gene or portion(s) thereof that are associated, individually and/or in combination, with a disease or disorder, such as a uPA, SNCG, IDE, KNSL1, TNFRSF6 and LIPA-mediated disease or disorder. In particular embodiments of the transgenic animals provided herein, the animal contains a polymorphic uPA, SNCG, IDE, KNSL1, TNFRSF6 and LIPA gene or portion(s) thereof associated, individually and/or in combination, with thrombosis, thrombolytic diseases, stroke, atherosclerosis, coronary artery disease, cardiovascular disease, cardiac disorders, myocardial infarction, cardiomyopathies, proliferative diseases, cancer, tumor angiogenesis, tumor metastasis, arthritis, rheumatic diseases and inflammatory joint diseases. In further embodiments of the transgenic animals provided herein, the animal contains a polymorphic uPA, SNCG, IDE, KNSL1, TNFRSF6 and LIPA gene or portion(s) thereof associated, individually and/or in combination, with a neurodegenerative disease or disorder. In yet further embodiments of the transgenic animals provided herein, the animal contains a polymorphic uPA, SNCG, IDE, KNSL1, TNFRSF6 and LIPA gene or portion(s) thereof associated, individually and/or in combination, with Alzheimer's disease.

[0659] Exemplary polymorphic regions and particular allelic variants for use in the transgenic animals provided herein include those set forth in the Examples at Tables 2, 4 and 4-B, 6 and 6-B, 8, 10, 12 and 12-B, and A-F. In a particular embodiment, a transgenic animal provided herein contains heterologous transgenic element nucleic acid comprising a uPA, SNCG, IDE, KNSL1, TNFRSF6 or LIPA nucleic acid molecule described herein in the “Nucleic Acid Molecules”, “Primers, Probes and Antisense Nucleic Acids” and/or the “cDNAs” sections set forth herein. In another embodiment, a transgenic animal provided herein contains heterologous transgenic element nucleic acid containing a uPA, SNCG, IDE, KNSL1, TNFRSF6 or LIPA gene or portion(s) thereof that includes one or more polymorphisms associated individually and/or in combination with a uPA, SNCG, IDE, KNSL1, TNFRSF6 or LIPA-mediated disease or disorder. In a further embodiment, a transgenic animal provided herein contains heterologous transgenic element nucleic acid containing a uPA, SNCG, IDE, KNSL1, TNFRSF6 or LIPA gene or portion(s) thereof that includes one or more polymorphisms associated individually and/or in combination with a neurodegenerative disease or disorder. In particular embodiments, the neurodegenerative disease is Alzheimer's disease. In a yet further embodiment, the neurodegenerative disease is Alzheimer's disease with an age of onset that is greater than or equal to about 50 years, or greater than or equal to about 60 years, or greater than or equal to about 65 years.

[0660] In a particular exemplary embodiment, a transgenic animal provided herein contains as a heterologous transgenic element nucleic acid containing a uPA gene or portion(S) thereof that includes one or more polymorphisms that occur at nucleotide positions corresponding to the following nucleotide positions in SEQ ID NOS: 559 or 560, or the complementary positions thereof: nucleotide 401 which is an A, T or C; nucleotide 515 which is a T, G or A; nucleotide 748 which is a T, C or A; and nucleotide 1752 which is a C, G or A. In a further particular embodiment, the heterologous transgenic element is nucleic acid containing a uPA gene or portion(s) thereof that includes one or more polymorphisms that occur at nucleotide positions corresponding to the following nucleotide positions in SEQ ID NOS: 559 or 560, or the complementary positions thereof: nucleotide 401 which is an A; nucleotide 515 which is a T; nucleotide 748 which is a T; and nucleotide 1752 which is a C, or the complements thereof.

[0661] In another embodiment, a transgenic animal provided herein contains as a heterologous transgenic element nucleic acid containing a uPA gene or portion(s) thereof that includes one or more polymorphisms associated individually and/or in combination with a uPA-mediated disease or disorder and that occur at nucleotide positions corresponding to the following nucleotide positions: nucleotide 9, 401, 464, 515, 748, 1229, 1356, 1752, 1942, 2127, 2543, 3029, 3169, 3799, 3947, 4808, 5287, 6532, 178, 1363, 1423, 1465, 1540, 2297, 2445, 2653, 3080, 3546, 3664, 3816, 4320, 4369, 4399, 4851, 5186, 5204, 5787, 6519, 6909, 7235, 7848 and 7908 in SEQ ID NOS: 559 or 560 and nucleotides 79, 93, 256, 385 and 714 in SEQ ID NO: 563, or the complementary positions thereof.

[0662] In a particular embodiment, the transgenic animal contains as a heterologous transgenic element nucleic acid containing a uPA gene or portion(s) thereof that includes one or more polymorphisms associated with a uPA-mediated disease or disorder in combination with one or more polymorphisms that occur at nucleotide positions corresponding to the following nucleotide positions in SEQ ID NOS: 559 or 560, or the complementary positions thereof: nucleotide 401 which is an A, T or C, and in particular an A; nucleotide 515 which is a T, G or A, and in particular a T; nucleotide 748 which is a T, C or A, and in particular a T; and nucleotide 1752 which is a C, G or A, and in particular a C. In a further embodiment, the one or more polymorphisms associated with a uPA-mediated disease or disorder in combination with one or more of these polymorphisms at nucleotides corresponding to positions 401, 515, 748 and 1752 of SEQ ID NOS: 559 or 560 occur at nucleotide positions corresponding to the following nucleotide positions: nucleotide 464, 1229, 1356, 1942, 2127, 2543, 3029, 3169, 3799, 3947, 4808, 5287, 6532, 178, 1363, 1423, 1465, 1540, 2297, 2445, 2653, 3080, 3546, 3664, 3816, 4320, 4369, 4399, 4851, 5186, 5204, 5787, 6519, 6909, 7235, 7848 and 7908 in SEQ ID NOS: 559 or 560 and nucleotides 79, 93, 256, 385 and 714 in SEQ ID NO: 563, or the complementary positions thereof.

[0663] In another embodiment, a transgenic animal provided herein contains as a heterologous transgenic element nucleic acid containing a uPA gene or portion(s) thereof that includes one or more polymorphisms that is associated individually and/or in combination with a neurodegenerative disease or disorder and that occur at nucleotide positions corresponding to the following nucleotide positions: nucleotide 9, 401, 464, 515, 748, 1229, 1356, 1752, 1942, 2127, 2543, 3029, 3169, 3799, 3947, 4808, 5287, 6532, 178, 1363, 1423, 1465, 1540, 2297, 2445, 2653, 3080, 3546, 3664, 3816, 4320, 4369, 4399, 4851, 5186, 5204, 5787, 6519, 6909, 7235, 7848 and 7908 in SEQ ID NOS: 559 or 560 and nucleotides 79, 93, 256, 385 and 714 in SEQ ID NO: 563, or the complementary positions thereof. In a particular embodiment, the neurodegenerative disease is Alzheimer's disease. In a yet further embodiment, the neurodegenerative disease is Alzheimer's disease with an age of onset that is greater than or equal to about 50 years, or greater than or equal to about 60 years, or greater than or equal to about 65 years.

[0664] In a further embodiment, a transgenic animal provided herein contains as a heterologous transgenic element nucleic acid containing a uPA gene or portion(s) thereof that includes one or more polymorphisms associated individually and/or in combination with a neurodegenerative disease or disorder and that occur at nucleotide positions corresponding to the following nucleotide positions of SEQ ID NOS: 559 or 560: 9, 401, 464, 515, 748, 1229, 1356, 1752, 1942, 2127, 2543, 3029, 3169, 3799, 3947, 4808, 5287, and 6532, or the complementary positions thereof. In a yet further embodiment, a transgenic animal provided herein contains as a heterologous transgenic element nucleic acid containing a uPA gene or portion(s) thereof that includes one or more polymorphisms associated individually and/or in combination with a neurodegenerative disease or disorder and that occur at nucleotide positions corresponding to the following nucleotide positions of SEQ ID NOS: 559 or 560: 9, 401, 464, 515, 748, 1229, 1356, 1752, 1942, 2127, 2543, 3029 and 5287, or the complementary positions thereof. In another embodiment, a transgenic animal provided herein contains as a heterologous transgenic element nucleic acid containing a uPA gene or portion(s) thereof that includes one or more polymorphisms associated individually and/or in combination with a neurodegenerative disease or disorder and that occur at nucleotide positions corresponding to the following nucleotide positions of SEQ ID NOS: 559 or 560: 3169, 3947 and 6532, or the complementary positions thereof. In a particular embodiment, the nucleotide in position 3169 is T, at position 3947 is C, and at position 6532 is T, or the complements thereof. In another embodiment, a transgenic animal provided herein contains as a heterologous transgenic element nucleic acid containing a uPA gene or portion(s) thereof that includes one or more polymorphisms associated individually and/or in combination with a neurodegenerative disease or disorder and that occur at nucleotide positions corresponding to the following nucleotide positions: 178, 1363, 1423, 1465, 1540, 2297, 2445, 2653, 3080, 3546, 3664, 3816, 4320, 4369, 4399, 4851, 5186, 5204, 5787, 6519, 6909, 7235, 7848 and 7908 in SEQ ID NOS: 559 or 560 and nucleotide positions 79, 93, 256, 385 and 714 of SEQ ID NO: 563, or the complementary positions thereof. In yet another embodiment, a transgenic animal provided herein contains as a heterologous transgenic element nucleic acid containing a uPA gene or portion(s) thereof that includes one or more polymorphisms associated individually and/or in combination with a neurodegenerative disease or disorder and that occur at nucleotide positions corresponding to the following nucleotide positions: 178, 401, 464, 515 and 748 in SEQ ID NOS: 559 or 560 and positions 79, 93, 256, 385 and 714 of SEQ ID NO: 563, or the complementary positions thereof. In a further embodiment, a transgenic animal provided herein contains as a heterologous transgenic element nucleic acid containing a uPA gene or portion(s) thereof that includes one or more polymorphisms associated individually and/or in combination with a neurodegenerative disease or disorder and that occur at nucleotide positions corresponding to the following nucleotide positions of SEQ ID NOS: 559 or 560: 401, 515 and 748, or the complementary positions thereof. In a further embodiment, a transgenic animal provided herein contains as a heterologous transgenic element nucleic acid containing a uPA gene or portion(s) thereof that includes one or more polymorphisms associated individually and/or in combination with a neurodegenerative disease or disorder and that occur at nucleotide positions corresponding to the following nucleotide positions of SEQ ID NOS: 559 or 560: 6519, 6532, 6909 and 7235, or the complementary positions thereof. In particular embodiments, the neurodegenerative disease is Alzheimer's disease. In a yet further embodiment, the neurodegenerative disease is Alzheimer's disease with an age of onset that is greater than or equal to about 50 years, or greater than or equal to about 60 years, or greater than or equal to about 65 years.

[0665] In particular embodiments of any of the above embodiments of the transgenic animals provided herein, the nucleotide at position 9 is A or C, at position 401 is G or A, at position 464 is G or position 464 is deleted, at position 515 is C or T, at position 748 is G or T, at position 1229 is T or G, at position 1356 is C or T, at position 1752 is T or C, at position 1942 is G or A, at position 2127 is G or A, at position 2543 is G or A, at position 3029 is G or A, at position 3169 is C or T, at position 3799 is T or C, at position 3947 is C or T, at position 4808 is C or T, at position 5287 is T or C, at position 6532 is T or C, at position 178 is A or G, at position 1363 is C or A, at position 1423 is G or T, at position 1465 is C or A, at position 1540 is C or T, at position 2297 is C or T, at position 2445 is T or G, at position 2653 is G or A, at position 3080 is G or A, at position 3546 is C or G, at position 3664 is C or T, at position 3816 is A or C, at position 4320 is T or C, at position 4369 is G or A, at position 4399 is C or A, at position 4851 is G or A, at position 5186 is G or A, at position 5204 is G or A, at position 5787 is C or G, at position 6519 is C or G, at position 6909 is G or T, at position 7235 is G or position 7235 is deleted, at position 7848 is C or T, at position 7908 is A or C; and the nucleotide in SEQ ID NO: 563: at position 79 is T or C, at position 93 is a C or position 93 is deleted, at position 256 is G or T, at position 385 is C or T, at position 714-715 is the dinulceotide -GT- or the -GT- dinucleotide is deleted, or the complements thereof.

[0666] Transgenic animals can be generated that carry the polymorphic uPA, SNCG, IDE, KNSL1, TNFRSF6 and LIPA gene or a portion(s) thereof in all their cells or in only some of their cells [Lasko et al. (1992) Proc. Natl. Acad. Sci. U.S.A. 89:6232-6236]. A polymorphic uPA, SNCG, IDE, KNSL1, TNFRSF6 and LIPA gene or portion(s) thereof may be obtained in a number of ways. Exemplary methods for obtaining nucleic acid containing a polymorphic uPA, SNCG, IDE, KNSL1, TNFRSF6 and LIPA gene or portion(s) thereof are described herein with respect to methods of generating recombinant cells containing such nucleic acids. For example, a polymorphic uPA, SNCG, IDE, KNSL1, TNFRSF6 and LIPA gene or portion(s) thereof may be obtained by alteration, e.g., site-directed or amplification-mediated mutagenesis, of a wild-type or reference uPA, SNCG, IDE, KNSL1, TNFRSF6 and LIPA gene or cDNA, production of a synthetic nucleic acid using standard techniques known in the art or cloning from a cell source. uPA, SNCG, IDE, KNSL1, TNFRSF6 and LIPA genes or cDNAs may be obtained by employing standard cloning procedures using nucleic acids isolated from cells that express uPA, SNCG, IDE, KNSL1, TNFRSF6 and LIPA protein. Such cells include migratory cells, endothelial cells, chondrocytes and cells of the central nervous system, e.g., neurons and microglia. Human uPA protein is expressed, for example, in human embryonic kidney cells (HEK cells; see, e.g., U.S. Pat. Nos. 4,370,417 and 4,558,010), Hep3 cells (see, e.g., U.S. Pat. No. 5,242,819), the A431 cell line [Fabricant et al. (1977) Proc. Natl. Acad. Sci. U.S.A. 74:565-569 and Stoppelli et al. (1986) Cell 45:675-684], the HT1080 cell line [Andreasen et al. (1986) J. Biol. Chem. 261:7644-7651], the human glioblastoma cell line SNB19 [see, e.g., Mohanam et al. (2001) Clin. Cancer Res. 7:2519-2526] and human glioma cell lines U251, U87 and T98G [see, e.g., Nakada et al. (1999) J. Neuropathol. Exp. Neurol. 58:329-334].

[0667] The exogenous nucleic acid containing a polymorphic uPA, SNCG, IDE, KNSL1, TNFRSF6 and LIPA gene or portion(s) thereof that is used in the generation of transgenic animals provided herein contains, in particular embodiments, a sequence of nucleotides that ultimately provides for a product upon transcription of the uPA, SNCG, IDE, KNSL1, TNFRSF6 and LIPA gene or portion(s) thereof. The product can be, for instance, RNA and/or a protein translated from a transcript. For example, the product can be uPA, SNCG, IDE, KNSL1, TNFRSF6 and LIPA mRNA and/or a uPA, SNCG, IDE, KNSL1, TNFRSF6 and LIPA protein or a reporter molecule such as a reporter protein. If the polymorphic uPA, SNCG, IDE, KNSL1, TNFRSF6 and LIPA gene or portion(s) thereof being used in the generation of transgenic animals provided herein does not contain sequences that provide for transciption of the uPA, SNCG, IDE, KNSL1, TNFRSF6 and LIPA gene or portion(s) thereof, any appropriate transcription control sequences, such as a promoter, from any appropriate source which will provide for transciption of the uPA, SNCG, IDE, KNSL1, TNFRSF6 and LIPA gene or portion(s) thereof in the animal can be used. The nucleic acid containing a polymorphic uPA, SNCG, IDE, KNSL1, TNFRSF6 and LIPA gene or portion(s) thereof may be selectively introduced into and/or expressed in particular cell types by utilizing regulatory sequences linked to the uPA, SNCG, IDE, KNSL1, TNFRSF6 and LIPA gene or portion(s) thereof that function in particular cell types. If the polymorphism(s) occur in a transcription control region of a uPA, SNCG, IDE, KNSL1, TNFRSF6 and LIPA gene, the polymorphic control region of the gene can be isolated or synthesized and operatively linked to nucleic acid encoding a reporter molecule, e.g., β-galactosidase, a fluorescent protein such as green fluorescent protein, or some other readily detectable molecule, or nucleic acid encoding a uPA, SNCG, IDE, KNSL1, TNFRSF6 and LIPA protein. The resultant fusion gene can be used as the transgene that is introduced into an animal cell for use in development of a transgenic animal therefrom. The patterns and levels of expression of the reporter or other molecule in the transgenic animal can be analyzed and compared to those in a transgenic animal containing a fusion gene in which a wild-type or reference uPA, SNCG, IDE, KNSL1, TNFRSF6 and LIPA transcription control region sequence is operatively linked to nucleic acid encoding a reporter or other molecule.

[0668] In a particular embodiment, a transgenic animal provided herein contains as a heterologous transgenic element nucleic acid containing one or more uPA gene transcription control regions that include one or more polymorphisms that occur at nucleotide positions corresponding to the following nucleotide positions: 178, 401, 464, 515, 748, 6519, 6532, 6909 and 7235 in SEQ ID NOS: 559 or 560 and positions 79, 93, 256, 385 and 714 of SEQ ID NO: 563, or the complementary positions thereof. In further embodiments, the one or more uPA gene transcription control regions that include one or more polymorphisms that occur at nucleotide positions corresponding to the following nucleotide positions in SEQ ID NOS: 559 or 560: 178, 401, 464, 515, 748, or the complementary positions thereof. In particular embodiments, the nucleotide at position 178 is A or G, at position 401 is G or A, and in particular an A, at position 464 is G or position 464 is deleted, at position 515 is C or T, and in particular a T, and at position 748 is G or T, and in particular a T, or the complements thereof. In yet further embodiments, the one or more uPA gene transcription control regions that include one or more polymorphisms that occur at nucleotide positions corresponding to the following nucleotide positions in SEQ ID NOS: 559 or 560: 6519, 6532, 6909 and 7235, or the complementary positions thereof. In particular embodiments, the nucleotide at position 6519 is C or G, at position 6532 is T or C, at position 6909 is G or T, and at position 7235 is G, or the complements thereof, or position 7235 is deleted.

[0669] Expression of the exogenous polymorphic uPA, SNCG, IDE, KNSL1, TNFRSF6 and LIPA gene or portion(s) thereof in a transgenic animal can be assessed using standard techniques and compared to the expression of a wild-type or reference uPA, SNCG, IDE, KNSL1, TNFRSF6 and LIPA transgene or portion(s) thereof in a similar transgenic animal. For example, initial screening may be accomplished by Southern blot analysis or nucleic acid amplification techniques to analyze animal tissues to determine whether the exogenous polymorphic uPA, SNCG, IDE, KNSL1, TNFRSF6 and LIPA gene or portion(s) thereof integrated into the genome of the host animal or is present as an extrachromosomal element. The level of mRNA expression from an exogenous polymorphic uPA, SNCG, IDE, KNSL1, TNFRSF6 and LIPA transgene or portion(s) thereof in the tissues of a transgenic animal may be assessed using techniques that include, but are not limited to, Northern blot analysis of tissue samples, in situ hybridization analysis and RT-PCR (reverse transcriptase PCR). uPA, SNCG, IDE, KNSL1, TNFRSF6 and LIPA protein and activity may be detected and/or quantified using various techniques including immunoblot assays, zymography [see, e.g., Vasalli et al. (1984) J. Exp. Med. 159:1653-1668; Sappino et al. (1991) J. Clin. Invest. 88:1073-1079; and Zhou et al. (2000) EMBO J. 19:4817-4826], a plasminogen activation-based assay utilizing fluorogenic fibrin [Wu and Diamond (1995) Thromb. Haemost. 74:711-717] and a uPA, SNCG, IDE, KNSL1, TNFRSF6 and LIPA activity assay using a two-chain uPA, SNCG, IDE, KNSL1, TNFRSF6 and LIPA-specific fluorogenic substrate: glutamyl-glycyl-arginine-7-amino-4-methyl coumarin [Wolf et al. (1993) J. Biol. Chem. 268:16327-16331]. Reporter molecule levels may be determined using assays designed for detection of the particular molecule.

[0670] Transgenic animals can comprise other genetic alterations in addition to the presence of alleles of a uPA, SNCG, IDE, KNSL1, TNFRSF6 and LIPA gene or portion(s) thereof. For example, the genome can be altered to affect the function of the endogenous genes, contain marker genes, or contain other genetic alterations (e.g., alleles of other genes associated with disease). Thus, for example, a transgenic animal provided herein containing nucleic acid containing a polymorphic uPA, SNCG, IDE, KNSL1, TNFRSF6 and LIPA gene or portion(s) thereof may be one in which any endogenous uPA, SNCG, IDE, KNSL1, TNFRSF6 and LIPA gene has been deleted or changed such that the function and/or expression of the endogenous gene is altered. The alteration may be one which eliminates or significantly reduces endogenous uPA, SNCG, IDE, KNSL1, TNFRSF6 and LIPA protein and/or activity. The endogenous genome may also be altered to include, for example, a polymorphic gene or portion(s) thereof that is associated with a disease, such as a neurodegenerative disease or disorder. The neurodegenerative disease can be Alzheimer's disease. Thus, in a particular embodiment of the transgenic animals provided herein, the animal contains nucleic acid that contains an APOE4, APP, PS1, PS2 and/or Tau gene or portion thereof. In particular, the nucleic acid contains an APOE4, APP, PS1, PS2 and/or Tau gene or portion thereof that includes one or more polymorphisms that are associated with Alzheimer's disease. For example, transgenic mice that contain an APP transgene element have been developed [see, e.g., Hsiao et al. (1996) Science 274:177-178 (transgenic mice overexpressing the 695-amiino acid isoform of human Alzheimer β amyloid (Aβ) precursor protein containing a Lys670→Asn, Met671→Leu mutation) and Hsiao (1998) Exp. Gerontol. 33:883-889].

[0671] A “knock-out” of a gene means an alteration in the sequence of the gene that results in a decrease of function of the target gene, preferably such that target gene expression is undetectable or insignificant. “Knock-out” transgenics can be transgenic animals having a heterozygous knock-out of a gene or a homozygous knock-out. “Knock-outs” also include conditional knock-outs, where alteration of the target gene can occur upon, for example, exposure of the animal to a substance that promotes target gene alteration, introduction of an enzyme that promotes recombination at the target gene site (e.g., Cre in the Cre-lox system), or other method for directing the target gene alteration postnatally.

[0672] A “knock-in” of a target gene means an alteration in a host cell genome that results in altered expression (e.g., increased (including ectopic)) of the target gene, e.g., by introduction of an additional copy of the target gene, or by operatively inserting a regulatory sequence that provides for enhanced expression of an endogenous copy of the target gene. “Knock-in” transgenics of interest can be transgenic animals having a knock-in of an allele associated with neurodegenerative disease including Alzheimer's disease. Such transgenics can be heterozygous or homozygous for the knock-in gene. “Knock-ins” also encompass conditional knock-ins.

[0673] Suitable constructs for use in the generation of transgenic animals include, for example, constructs that allow the desired level of expression of a transgene or portion(s) thereof. Methods of isolating and cloning a desired sequence, as well as suitable constructs for expression of a selected sequence in a host animal, are well known in the art and are described herein.

[0674] For the generation of transgenic animals, it is generally advantageous to use a nucleic acid construct for introduction of the heterologous nucleic acid into an animal cell wherein the gene, coding sequence or portion(s) thereof is ligated downstream of a promoter capable of and operably linked to the gene, coding sequence or portion(s) thereof for expression of the gene, coding sequence or portion(s) thereof in the subject animal cells. The promoter of the transgene of interest may be used if it will provide for gene expression in the animal.

[0675] For example, a transgenic mammal, in particular a non-human mammal, showing high expression of a desired transgene can be created by microinjecting into a fertilized egg of a non-human mammal (e.g., rat fertilized egg) a vector ligated with the gene or portion(s) thereof downstream of various promoters derived from various mammals (e.g., rabbits, dogs, cats, guinea pigs, hamsters, rats, mice etc., preferably rats etc.) capable of expressing a transcription product and/or a corresponding protein.

[0676] Vectors include Escherichia coli-derived plasmids, Bacillus subtilis-derived plasmids, yeast-derived plasmids, bacteriophages such as lambda, phage, retroviruses such as Moloney leukemia virus, and animal viruses such as vaccinia virus or baculovirus.

[0677] Promoters for gene expression regulation include, for example, promoters for genes derived from viruses (e.g., cytomegalovirus, Moloney leukemia virus, JC virus, breast cancer virus etc.), and promoters for genes derived from various mammals (e.g., humans, rabbits, dogs, cats, guinea pigs, hamsters, rats, mice etc.) and birds (e.g., chickens etc.) [e.g., genes for albumin, insulin II, erythropoietin, endothelin, osteocalcin, muscular creatine kinase, platelet-derived growth factor beta, keratins K1, K10 and K14, collagen types I and II, atrial natriuretic factor, dopamine beta-hydroxylase, endothelial receptor tyrosine kinase (generally abbreviated Tie2), sodium-potassium adenosine triphosphorylase (generally abbreviated Na, K-ATPase), neurofilament light chain, met allothioneins I and IIA, met alloproteinase I tissue inhibitor, MHC class I antigen (generally abbreviated H-2L), smooth muscle alpha actin, polypeptide chain elongation factor 1 alpha (EF-1 alpha), beta actin, alpha and beta myosin heavy chains, myosin light chains 1 and 2, myelin base protein, serum amyloid component, myoglobin, renin etc.].

[0678] The above-mentioned vectors can have a sequence for terminating the transcription of the desired messenger RNA in the transgenic animal (generally referred to as terminator); for example, gene expression can be manipulated using a sequence with such function contained in various genes derived from viruses, mammals and birds. The simian virus SV40 terminator etc. is commonly used. Additionally, for the purpose of increasing the expression of the desired gene, various other elements may be included: e.g., the splicing signal and enhancer region of each gene, a portion of the intron of a eukaryotic organism gene may be ligated 5′ upstream of the promoter region, or between the promoter region and the translational region, or 3′ downstream of the translational region as desired.

[0679] Nucleic acid containing a transgene, or portion thereof, can be obtained, for example, from genomic DNA of blood, kidney or fibroblast origin from various animals (e.g., humans, rabbits, dogs, cats, guinea pigs, hamsters, rats, mice etc.) or from various commercially available genomic DNA libraries, as a starting material, or using complementary DNA prepared by a known method from RNA of blood, kidney or fibroblast origin as a starting material. Also, an exogenous gene can be obtained using complementary DNA prepared by a known method from RNA of human fibroblast origin as a starting material.

[0680] The nucleic acid can then be incorporated into a vector to facilitate transfer into an animal cell. If desired, the nucleic acid can be ligated downstream of a promoter (preferably upstream of the translation termination site) as a gene construct capable of being expressed in the transgenic animal.

[0681] Nucleic acid constructs for random integration need not include regions of homology to mediate recombination. Where homologous recombination is desired, the constructs will comprise the heterologous transgene element and will include regions of homology to a target locus. Conveniently, markers for positive and negative selection are included. Methods for generating cells having targeted gene modifications through homologous recombination are known in the art. For various techniques for transfecting mammalian cells, see Keown et al. (1990) Methods in Enzymology 185:527-537.

[0682] The transgenic animal can be created by introducing a nucleic acid construct into, for example, an unfertilized egg, a fertilized egg, a spermatozoon or a germinal cell containing a primordial germinal cell thereof, preferably in the embryogenic stage in the development of a non-human mammal (and in particular in the single-cell or fertilized cell stage and generally before the 8-cell phase), by standard means, such as the calcium phosphate method, the electric pulse method, the lipofection method, the agglutination method, the microinjection method, the particle gun method, the DEAE-dextran method and other such method. Also, it is possible to introduce a desired gene into a somatic cell, a living organ, a tissue cell or other cell, by gene transformation methods, and use it for cell culture, tissue culture and any other method of propagation. Furthermore, these cells may be fused with the above-described germinal cell by a commonly known cell fusion method to create a transgenic animal.

[0683] For embryonic stem (ES) cells, an ES cell line may be employed, or embryonic cells may be obtained freshly from a host, e.g., mouse, rat, guinea pig, etc. Such cells are grown on an appropriate fibroblast-feeder layer or grown in the presence of appropriate growth factors, such as leukemia inhibiting factor (LIF). When ES cells have been transformed, they may be used to produce transgenic animals. After transformation, the cells are plated onto a feeder layer in an appropriate medium. Cells containing the construct may be detected by employing a selective medium. After sufficient time for colonies to grow, they are picked and analyzed for the occurrence of homologous recombination or integration of the construct. Those colonies that are positive may then be used for embryo manipulation and blastocyst injection. Blastocysts can be obtained from 4 to 6 week old superovulated females. The ES cells can be trypsinized, and the modified cells injected into the blastocoel of the blastocyst. After injection, the blastocysts are returned to recipient, e.g., pseudopregnant, females. Females are then allowed to go to term and the resulting offspring screened for cells having the construct. By providing for a different phenotype of the blastocyst and the ES cells, chimeric progeny can be readily detected. Chimeric animals may be screened for the presence of the modified gene. Males and females having the modification can be mated to produce homozygous progeny. If the gene alterations cause lethality at some point in development, tissues or organs can be maintained as allogeneic or congenic grafts or transplants, or in vitro culture.

[0684] Animals containing more than one transgene can be made by sequentially introducing individual alleles into an animal in order to produce the desired phenotype (e.g., a structural, molecular, or functional event associated with a disease or disorder). For example, a desired phenotype may be that of a neurodegenerative disease, such as AD, and may include amyloid deposition, neuropathological developments, learning and memory deficits and other possible neurodegenerative disease-associated characteristics.

[0685] For example, transgenic mouse models for Alzheimer's disease have been proposed which encode human or murine Alzheimer Related Membrane Protein (ARMP) homologues mutated to manifest an Alzheimer phenotype (see U.S. Pat. No. 6,210,919).

[0686] Numerous transgenic mice exhibiting various characteristics of AD and other neurodegenerative diseases are available. These have been made using APP, PS1, PS2, Tau, APOE and other genes, alone and in combinations (see www.alzforum.org/members/resources/transgenic/index.html).

[0687] Transgenic animals can be made containing any alleles of a uPA, SNCG, IDE, KNSL1, TNFRSF6 and LIPA gene, either individually or in combinations. Those of ordinary skill would be able to determine appropriate sequences to be utilized based on the sequences of the uPA, SNCG, IDE, KNSL1, TNFRSF6 and LIPA gene and cDNA provided herein. An example of a useful uPA sequence is a sequence with one or more of the polymorphisms indicated in FIG. 9 and SEQ ID NO: 563. FIG. 9 and SEQ ID NO: 563 indicate the positions in a cDNA sequence that correspond to the following polymorphic regions regions described in Tables 12 and F for a uPA gene: 2e.5′utr (49), rs2227555 (59), rs2227580 (119), 4e.cds+173 (249), 6e.cds +422 (498), rs 1050120 (718), rs2229301 (rs2227567 (767), 8e.cds+822 (898), rs1050122 (1156), rs1130957 (1174), rs1050124 (1500), 11e.utr+141 (1512), rs1804874 (1892) and rs2227574 (2220).

[0688] O. Allelic Variants

[0689] An allelic variant, depending on its location in the gene, can play various roles in the manifestation of a disease condition. An allelic variant can produce its effect at the level of RNA or protein. Effects on RNA include altered splicing, stability, editing and expression. Effects on the protein include altered protein function, folding, transport, localization, stability and expression. Polymorphisms located in the 5′ untranslated region of the gene may alter the activity of an element of the gene promoter and change the expression of the mRNA (e.g., level or timing of expression). Polymorphisms located in introns may alter RNA stability, editing, splicing, etc. SNPs located in the 3′ untranslated region may influence polyadenylation, or mRNA stability. Silent alteration in the coding region of an gene may affect codon usage or splicing. Changes in amino acids, deletions or insertions may affect protein function by increasing or decreasing a native function or bringing about an altered function. The effect of a polymorphism can be determined by producing transgenic animals in which the allelic variant has been introduced and in which the wild-type gene or predominant allele may have been knocked out. RNA and/or protein is compared in the mice transgenic harboring the allelic variant with mice transgenic harboring the predominant allele. For example, the variant may result in alterations of RNA levels or RNA stability or in increased or decreased synthesis of the associated protein and/or aberrant tissue distribution or intracellular localization of the associated protein, altered phosphorylation, glycosylation and/or altered activity of the protein. Furthermore, various molecular, cellular and organismal manifestations of AD can be monitored; such as APP gene products, neurite plaques, memory and learning and neurodegeneration of specific systems of cells. Such analysis could also be performed in cultured cells, in which the human variant allele gene is introduced and, e.g., replaces the endogenous gene in the cell. These effects can be determined according to methods known in the art and as described below. Allelic variants can be assayed individually or in combination.

[0690] 1. RNA Analysis

[0691] a. Northern Blot Detection of RNA

[0692] The northern blot technique is used to identify a RNA fragment of a specific size from a complex population of RNA using gel electrophoresis and nucleic acid hybridization. Northern blotting is a well-known technique in the art. Northern blot analysis is commonly used to detect specific RNA transcripts expressed in a variety of biological samples and have been described in Sambrook, J. et al. (2000) “Molecular Cloning,” 3d ed. Cold Spring Harbor Press.

[0693] Briefly, total RNA is isolated from any biological sample by the method of Chomczynski and Sacchi (1987) Anal. Biochem. 162:156-159. Poly-adenylated mRNA is purified from total RNA using mini-oligo (dT) cellulose spin column kit with methods as outlined by the suppliers (Invitrogen, Carlsbad Calif.). Denatured RNA is electrophoresed through a denaturing 1.5% agarose gel and transferred onto a nitrocellulose or nylon based matrix. The mRNAs are detected by hybridization of a radiolabeled or biotinylated oligonucleotide probe specific to the polymorphic regions as disclosed herein.

[0694] b. Dot Blot/Slot Blot

[0695] Specific RNA transcripts can be detected using dot and slot blot assays to evaluate the presence of a specific nucleic acid sequence in a complex mix of nucleic acids. Specific RNA transcripts can be detected by adding the RNA mixture to a prepared nitrocellulose or nylon membrane. RNA is detected by the hybridization of a radiolabeled or biotinylated oligonucleotide probe complementary to the sequences as disclosed herein.

[0696] c. RT-PCR

[0697] The RT-PCR reaction may be performed, as described by K.-Q. Hu et al. (1991) Virology 181:721-726, as follows: the extracted mRNA is transcribed in a reaction mixture 1 micromolar antisense primer, and 25 U AMV (avian myeloblastosis virus) or MMLV (Moloney murine leukemia virus) reverse transcriptase. Reverse transcription is performed and the cDNA is amplified in a PCR reaction volume with Taq polymerase. Optimal conditions for cDNA synthesis and thermal cycling can be readily determined by those skilled in the art.

[0698] 2. Protein and Polypeptide Detection

[0699] a. Expression of Protein in a Cell Line

[0700] Using the disclosed nucleic acid sequences and other that can be obtained using methods described herein proteins of interest may be expressed in a recombinantly engineered cell such as bacteria, yeast, insect, mammalian, or plant cells. Those of ordinary skill in the art are knowledgeable of the numerous expression systems available for expression of a nucleic acid encoding proteins, including polymorphic proteins.

[0701] b. Expression of Proteins

[0702] The isolated nucleic acid encoding a full-length polymorphic protein, or a portion thereof, such as a fragment containing the site of the polymorphism, may be introduced into a vector for transfer into host cells. Fragments of the polymorphic proteins can be produced by those skilled in the art, without undue experimentation, by eliminating portions of the coding sequence from the isolated nucleic acids encoding the full-length proteins.

[0703] Expression vectors are used when expression of the protein in the host cell is desired. An expression vector includes vectors capable of expressing nucleic acids that are operatively linked with regulatory sequences, such as promoter regions, that are capable of affecting expression of such nucleic acids. Thus, an expression vector refers to a recombinant DNA or RNA construct, such as a plasmid, a phage, recombinant virus or other vector that, upon introduction into an appropriate host cell, results in expression of the cloned DNA. Appropriate expression vectors are well known to those of skill in the art and include those that are replicable in eukaryotic cells and/or prokaryotic cells and those that remain episomal or those which integrate into the host cell genome. Such plasmids for expression of polymorphic human uPA, SNCG, IDE, LIPA, TNFRSF6 or KNSL1 encoding nucleic acids in eukaryotic host cells, particularly mammalian cells, include cytomegalovirus (CMV) promoter-containing vectors, such as pCMV5, the pSV2dhfr expression vectors, which contain the SV40 early promoter, mouse dhfr gene, SV40 polyadenylation and splice sites and sequences necessary for maintaining the vector in bacteria, and MMTV promoter-based vectors.

[0704] The nucleic acids encoding polymorphic proteins, and vectors and cells containing the nucleic acids as provided herein permit production of the polymorphic proteins, as well as antibodies to the proteins. This provides a means to prepare synthetic or recombinant polymorphic proteins and fragments thereof that are substantially free of contamination from other proteins, the presence of which can interfere with analysis of the polymorphic proteins. In addition, the polymorphic proteins may be expressed in combination with selected other proteins that the protein of interest may associate with in cells. The ability to selectively express the polymorphic proteins alone or in combination with other selected proteins makes it possible to observe the functioning of the recombinant polymorphic proteins within the environment of a cell. The expression of isolated nucleic acids encoding a protein will typically be achieved by operably linking, for example, the DNA or cDNA to a promoter (which is either constitutive or regulatable), followed by incorporation into an expression vector.

[0705] The vectors can be suitable for replication and integration in either prokaryotes or eukaryotes. Typical expression vectors contain transcription and translation terminators, initiation sequences, and promoters useful for regulation of the expression of the DNA encoding a protein. To obtain high level expression of a cloned gene, it is desirable to construct expression vectors which contain, a strong promoter to direct transcription, a ribosome binding site for translational initiation, and a transcription/translation terminator. One of ordinary skill in the art would recognize that modifications can be made to a protein without diminishing its biological activity. Some modifications may be made to facilitate the cloning, expression, or incorporation of the targeting molecule into a fusion protein. Such modifications are well known to those of skill in the art and include, for example, a methionine added at the amino terminus to provide an initiation site, or additional amino acids (e.g., poly His) placed on either terminus to create conveniently located purification sequences. Restriction sites or termination codons can also be introduced. There are expression vectors that specifically allow the expression of functional proteins. One such vector, Plasmid 577, described in U.S. Pat. No. 6,020,122 and incorporated herein by reference, has been constructed for the expression of secreted antigens in a permanent cell line. This plasmid contains the following DNA segments: (a) a fragment of pBR322 containing bacterial beta-lactamase and origin of DNA replication; (b) a cassette directing expression of a neomycin resistance gene under control of HSV-1 thymidine kinase promoter and poly-A addition signals; (c) a cassette directing expression of a dihydrofolate reductase gene under the control of a SV-40 promoter and poly-A addition signals; (d) cassette directing expression of a rabbit immunoglobulin heavy chain signal sequence fused to a modified hepatitis C virus (HCV) E2 protein under the control of the Simian Virus 40 T-Ag promoter and transcription enhancer, the hepatitis B virus surface antigen (HBsAg) enhancer I followed by a fragment of Herpes Simplex Virus-1 (HSV-1) genome providing poly-A addition signals; and (e) a fragment of Simian Virus 40 genome late region of no function in this plasmid. All of the segments of the vector were assembled by standard methods known to those skilled in the art of molecular biology. Plasmids for the expression of uPA, SNCG, IDE, LIPA, TNFRSF6 or KNSL1 proteins can be constructed by replacing the hepatitis C virus E2 protein coding sequence in plasmid 577 with a uPA, SNCG, IDE, LIPA, TNFRSF6 or KNSL1 coding sequence or a fragment thereof (see above). The resulting plasmid is transfected into CHO/dhfr-cells (DXB-111) (Uriacio, et al. (1980) PNAS 77:4451-4466; these cells are available from the A.T.C.C., 12301 Parklawn Drive, Rockville, Md. 20852, under Accession No. CRL 9096), using the cationic liposome-mediated procedure (P. L. Feigner et al. (1987) PNAS 84:7413-7417). Proteins are secreted into the cell culture media.

[0706] Incorporation of cloned DNA into a suitable expression vector, transfection of cells with a plasmid vector or a combination of plasmid vectors, each encoding one or more distinct proteins or with linear DNA, and selection of transfected cells are well known in the art (see, e.g., Sambrook et al. (1989) “Molecular Cloning: A Laboratory Manual,” 2d ed. Cold Spring Harbor Laboratory Press). Heterologous nucleic acid may be introduced into host cells by any method known to those of skill in the art, such as transfection with a vector encoding the heterologous nucleic acid by CaPO₄ precipitation (see, e.g., Wigler et al. (1979) Proc. Natl. Acad. Sci. U.S.A. 76:1373-1376) or lipofectamine (Invitrogen, Carlsbad, Calif.). Recombinant cells can then be cultured under conditions whereby the polymorphic human uPA, SNCG, IDE, LIPA, TNFRSF6 or KNSL1 protein encoded by the nucleic acid is expressed. Suitable host cells include mammalian cells (e.g., HEK293, including but are not limited to, those described in U.S. Pat. No. 5,024,939 to Gorman (see, also, Stillman et al. (1985) Mol. Cell. Biol. 5:2051-2060); also, HEK293 cells available from ATCC under accession #CRL 1573), CHO, COS, BHKBI and Ltk⁻ cells, mouse monocyte macrophage P388D1 and J774A-1 cells (available from ATCC, Rockville, Md.) and others known to those of skill in this art), yeast cells, including, but are not limited to, Pichia pastoris, Saccharomyces cerevisiae, Candida tropicalis, Hansenula polymorpha, human cells and bacterial cells, including, but are not limited to, Escherichia coli. Xenopus oöcytes may also be used for expression of in vitro RNA transcripts of the DNA.

[0707] Heterologous nucleic acid may be stably incorporated into cells or may be transiently expressed using methods known in the art. Stably transfected mammalian cells may be prepared by transfecting cells with an expression vector having a selectable marker gene (such as, for example, the gene for thymidine kinase, dihydrofolate reductase, neomycin resistance, and the like), and growing the transfected cells under conditions selective for cells expressing the marker gene. To prepare transient transfectants, mammalian cells are transfected with a reporter gene (such as the E. coli β-galactosidase gene) to monitor transfection efficiency. Selectable marker genes are not included in the transient transfections because the transfectants are typically not grown under selective conditions, and are usually analyzed within a few days after transfection.

[0708] Heterologous nucleic acid may be maintained in the cell as an episomal element or may be integrated into chromosomal DNA of the cell. The resulting recombinant cells may then be cultured or subcultured (or passaged, in the case of mammalian cells) from such a culture or a subculture thereof. Methods for transfection, injection and culturing recombinant cells are known to the skilled artisan. Similarly, the polymorphic human proteins or fragments thereof may be purified using protein purification methods known to those of skill in the art. For example, antibodies or other ligands that specifically bind to the proteins may be used for affinity purification and immunoprecipitation of the proteins.

[0709] C. Protein Purification

[0710] The proteins may be purified by standard techniques well known to those of skill in the art. Recombinantly produced polymorphic proteins can be directly expressed or expressed as a fusion protein. The recombinant protein is purified by a combination of cell lysis (e.g., sonication, French press) and affinity chromatography. The proteins, recombinant or synthetic, may be purified to substantial purity by standard techniques well known in the art, including detergent solubilization, selective precipitation with such substances as ammonium sulfate, column chromatography, immunopurification methods, and others. (See, for example, R. Scopes (1982) “Protein Purification: Principles and Practice,” Springer-Verlag (New York); Deutscher (1990) “Guide to Protein Purification,” Academic Press). For example, antibodies may be raised to the proteins as described herein. Purification from E. coli can be achieved following procedures described in U.S. Pat. No. 4,511,503. The protein may then be isolated from cells expressing the protein and further purified by standard protein chemistry techniques as described herein. Detection of the expressed protein is achieved by methods known in the art and include, for example, radioimmunoassays, Western blotting techniques or immunoprecipitation.

[0711] Exemplary polymorphic proteins provided herein include an isolated KNSL1 polymorphic protein, comprising an amino acid sequence selected from the group consisting of SEQ ID NO: 472, SEQ ID NO: 474, and SEQ ID NO: 476. In a particular embodiment, the amino acid at position 869 of SEQ ID NOs: 472, 474 and 476 is a cysteine.

[0712] 3. Immunodetection

[0713] Generally, the proteins, when presented as an immunogen, should elicit production of a specifically reactive antibody. Immunoassays for determining binding are well known to those of skill in the art, as are methods of making and assaying for antibody binding specificity/affinity. Exemplary immunoassay formats include ELISA, competitive immunoassays, radioimmunoassays, Western blots, indirect immunofluorescent assays, in vivo expression or immunization protocols with purified protein preparations. In general, the detection of immunocomplex formation is well known in the art and may be achieved by methods generally based upon the detection of a label or marker, such as any of the radioactive, fluorescent, biological or enzymatic tags. Labels are well known to those skilled in the art (see U.S. Pat. Nos. 3,817,837; 3,850,752; 3,939,350; 3,996,345; 4,277,437; 4,275,149 and 4,366,241, each incorporated herein by reference). Of course, one may find additional advantages through the use of a secondary binding ligand such as a second antibody or a biotin/avidin ligand binding arrangement, as is known in the art.

[0714] a. Production of Polyclonal Antisera

[0715] Antibodies can be raised to specific proteins, including individual, allelic, strain, or species variants, and fragments thereof, both in their naturally occurring (full-length) forms and in recombinant forms. Additionally, antibodies are raised to these proteins in either their native configurations or in non-native configurations. Anti-idiotypic antibodies can also be generated. A variety of analytic methods are available to generate a hydrophilicity profile of proteins. Such methods can be used to guide the artisan in the selection of peptides for use in the generation or selection of antibodies which are specifically reactive, under immunogenic conditions. See, e.g., J. Janin (1979) Nature 277:491-492; Wolfenden et al. (1981) Biochemistry 20:849-855; Kyte and Doolite (1982) J. Mol. Biol. 157:105-132; Rose et al. (1985) Science 229:834-838.

[0716] A number of immunogens can be used to produce antibodies specifically reactive with specific proteins. An isolated recombinant, synthetic, or native polynucleotide are the preferred immunogens (antigen) for the production of monoclonal or polyclonal antibodies. Polypeptides are typically denatured, and optionally reduced, prior to formation of antibodies for screening expression libraries or other assays in which a putative protein is expressed or denatured in a non-native secondary, tertiary, or quartenary structure.

[0717] The protein or a portion thereof is injected into an animal capable of producing antibodies. Either monoclonal or polyclonal antibodies can be generated for subsequent use in immunoassays to measure the presence and quantity of the protein. Methods of producing polyclonal antibodies are known to those of skill in the art. In brief, an immunogen (antigen), preferably a purified protein, a protein coupled to an appropriate carrier (e.g., GST, keyhole limpet hemanocyanin, etc.), or a protein incorporated into an immunization vector such as a recombinant vaccinia virus (see, U.S. Pat. No. 4,722,848) is mixed with an adjuvant and animals are immunized with the mixture. The animal's immune response to the immunogen preparation is monitored by taking test bleeds and determining the titer of reactivity to the protein of interest. When appropriately high titers of antibody to the immunogen are obtained, blood is collected from the animal and antisera are prepared. Further fractionation of the antisera to enrich for antibodies reactive to the protein is performed where desired (See, e.g., Coligan (1991) “Current Protocols in Immunology,” Wiley/Greene (New York); and Harlow and Lane (1989) “Antibodies: A Laboratory Manual,” Cold Spring Harbor Press (New York)).

[0718] Exemplary antibodies to polymorphic proteins provided herein include antibodies, either polymorphic or monoclonal, specific against an isolated KNSL1 polymorphic protein, comprising an amino acid sequence selected from the group consisting of SEQ ID NO: 472, SEQ ID NO: 474, and SEQ ID NO: 476.

[0719] b. Western Blotting

[0720] Biological samples are homogenized in SDS-PAGE sample buffer (50 mM Tris-HCl, pH 6.8, 100 mM dithiothreitol, 2% SDS, 0.1 % bromophenol blue, 10% glycerol), heated at 100° C. for 10 min and run on a 14% SDS-PAGE with a 25 mM Tris-HCl, pH 8.3, 250 mM Glycine, 0.1% SDS running buffer. The proteins are electrophoretically transferred to nitrocellulose in a transfer buffer containing 39 mM glycine, 48 mM Tris-HCl, pH 8.3, 0.037% SDS, 20% methanol. The nitrocellulose is dried at room temperature for 60 min and then blocked with a PBS solution containing either bovine serum albumin or 5% nonfat dried milk for 2 hours at 4° C.

[0721] The filter is placed in a heat-sealable plastic bag containing a solution of 5% nonfat dried milk in PBS with a 1:100 to 1:2000 dilution of affinity purified anti-uPA, SNCG, IDE, LIPA, TNFRSF6 or KNSL1 peptide antibodies, incubated at 4° C. for 2 hours, followed by three 10 min washes in PBS. An alkaline phosphatase conjugated secondary antibody (i.e., anti-mouse/rabbit IgG), is added at a 1:200 to 1:2000 dilution to the filter in a 150 mM NaCl, 50 mM Tris-HCl, pH 7.5 buffer and incubated for 1 h at room temperature.

[0722] The bands are visualized upon the addition and development of a chromogenic substrate such as 5-bromo-4-chloro-3-indolyl phosphate/nitro blue tetrazolium (BCIP/NBT). The filter is incubated in the solution at room temperature until the bands develop to the desired intensity. Molecular mass determination is made based upon the mobility of pre-stained molecular weight standards (Rainbow markers, Amersham, Arlington Heights, Ill.).

[0723] c. Microparticle Enzyme Immunoassay (MEIA)

[0724] Proteins and peptides are detected using a standard commercialized antigen competition EIA assay or polyclonal antibody sandwich EIA assay on the IMx.RTM Analyzer (Abbott Laboratories, Abbott Park, Ill.). Samples containing the specific protein are incubated in the presence of antibody coated microparticles. The microparticles are washed and secondary polyclonal antibodies conjugated with detectable entities (i.e., alkaline phosphatase) are added and incubated with the microparticles. The microparticles are washed and the bound antibody/antigen/antibody complexes are detected by adding a substrate (i.e. 4-methyl umbelliferyl phosphate) (MUP) that will react with the secondary conjugated antibody to generate a detectable signal.

[0725] d. Immunocytochemistry

[0726] Intracellular localization of a specific protein can be determined by a variety of in situ hybridization techniques. In one method cells are fixed with 4% paraformaldehyde in 0.1 M phosphate buffered saline (PBS; pH7.4) for 5 min., rinsed in PBS for 2 min., dilapidated and dehydrated in an ethanol series (50, 70 and 95%) (5 min. each and stored in 95% ethanol at 4° C.).

[0727] The cells are stained with a primary antibody and a mixture of secondary antibodies used for detection. Laser-scanning confocal microscopy is performed to localize the protein.

[0728] P. Cells Containing Isolated Nucleic Acids

[0729] The disclosed nucleic acids and others that can be obtained using methods described herein may be transferred into a host cell such as bacteria, yeast, insect, mammalian, or plant cell for recombinant expression therein. Thus, provided herein are recombinant cells containing a uPA, SNCG, IDE, KNSL1, TNFRSF6 or LIPA gene or a portion or portions thereof, such as, for example, a transcriptional control region (including, for example, a promoter and 3′ untranslated (UTR) sequences) and/or a coding sequence of a uPA, SNCG, IDE, KNSL1, TNFRSF6 or LIPA gene. The uPA, SNCG, IDE, KNSL1, TNFRSF6 or LIPA gene or portion(s) thereof contains at least one polymorphic region and is thus referred to as a polymorphic uPA, SNCG, IDE, KNSL1, TNFRSF6 or LIPA gene or portion(s) thereof. A “uPA, SNCG, IDE, KNSL1, TNFRSF6 or LIPA gene or a portion or portions thereof” includes a uPA, SNCG, IDE, KNSL1, TNFRSF6 or LIPA cDNA or portion(s) thereof. In particular embodiments, the polymorphic uPA, SNCG, IDE, KNSL1, TNFRSF6 or LIPA gene is a human polymorphic uPA, SNCG, IDE, KNSL1, TNFRSF6 or LIPA gene.

[0730] Cells containing nucleic acids encoding polymorphic uPA, SNCG, IDE, KNSL1, TNFRSF6 or LIPA proteins, and vectors and cells containing the nucleic acids as provided herein permit production of the polymorphic proteins, as well as antibodies to the proteins. This provides a means to prepare synthetic or recombinant polymorphic proteins and fragments thereof that are substantially free of contamination from other proteins, the presence of which can interfere with analysis of the polymorphic proteins. In addition, the polymorphic proteins may be expressed in combination with selected other proteins that the protein of interest may associate with in cells. The ability to selectively express the polymorphic proteins alone or in combination with other selected proteins makes it possible to observe the functioning of the recombinant polymorphic proteins within the environment of a cell.

[0731] Recombinant cells provided herein may be used for numerous purposes. For example, the cells may be used in testing polymorphic uPA, SNCG, IDE, KNSL1, TNFRSF6 or LIPA genes or portion(s) thereof for characterization of phenotypic outcomes correlated with the particular polymorphisms. The cells may also be used in the production of recombinant uPA, SNCG, IDE, KNSL1, TNFRSF6 or LIPA protein. Such protein may be used, for example, in assays for molecules that bind to, and in particular affect the activity of, uPA, SNCG, IDE, KNSL1, TNFRSF6 or LIPA. The proteins may also be used in the production of antibodies specific for the protein. Additionally, the recombinant uPA, SNCG, IDE, KNSL1, TNFRSF6 or LIPA protein may be used as a source of serine protease activity. For example, the recombinant uPA, SNCG, IDE, KNSL1, TNFRSF6 or LIPA may be used to activate plasminogen and generate plasmin used to degrade fibrin. Recombinant cells containing polymorphic uPA, SNCG, IDE, KNSL1, TNFRSF6 or LIPA genes or portion(s) thereof may also be used in methods of identifying agents that modulate uPA, SNCG, IDE, KNSL1, TNFRSF6 or LIPA gene and protein expression and/or activity or that modulate a biological event characteristic of a disease or disorder involving altered uPA, SNCG, IDE, KNSL1, TNFRSF6 or LIPA gene and/or protein expression or function which may be candidate treatments for a disease or disorder.

[0732] Also provided herein are methods of producing recombinant cells by introducing a polymorphic uPA, SNCG, IDE, KNSL1, TNFRSF6 or LIPA gene or portion(s) thereof into a cell. The cell may be any transfectable cell. Such cells, and methods of introducing heterologous nucleic acids into the cells, are known to those of skill in the art.

[0733] Nucleic acids for use in generating recombinant cells provided herein are nucleic acids containing one or more polymorphic regions of a uPA, SNCG, IDE, KNSL1, TNFRSF6 or LIPA gene and particular polymorphisms thereof, such as particular uPA, SNCG, IDE, KNSL1, TNFRSF6 or LIPA gene alleles. In particular embodiments, the nucleic acid used in generating a recombinant cell contains a human uPA, SNCG, IDE, KNSL1, TNFRSF6 or LIPA gene or portion(s) thereof containing at least one polymorphic region. Of particular interest are variants of a uPA, SNCG, IDE, KNSL1, TNFRSF6 or LIPA gene or portion(s) thereof that are associated with a disease or disorder, such as a uPA, SNCG, IDE, KNSL1, TNFRSF6 or LIPA-mediated disease or disorder. In particular embodiments of the recombinant cells provided herein, the cell contains a polymorphic uPA, SNCG, IDE, KNSL1, TNFRSF6 or LIPA gene or portion(s) thereof associated with thrombosis, thrombolytic diseases, stroke, atherosclerosis, coronary artery disease, cardiovascular disease, cardiac disorders, myocardial infarction, cardiomyopathies, proliferative diseases, cancer, tumor angiogenesis, tumor metastasis, arthritis, rheumatic diseases and inflammatory diseases, including inflammatory joint disease. In further embodiments of the recombinant cells provided herein, the cell contains a polymorphic uPA, SNCG, IDE, KNSL1, TNFRSF6 or LIPA gene or portion(s) thereof associated with a neurodegenerative disease or disorder. In yet further embodiments of the recombinant cells provided herein, the cell contains a polymorphic uPA, SNCG, IDE, KNSL1, TNFRSF6 or LIPA gene or portion(s) thereof associated with Alzheimer's disease.

[0734] Exemplary polymorphic regions and particular allelic variants for use in the recombinant cells provided herein include those set forth in the Examples at Tables 2, 4 and 4-B, 6 and 6-B, 8, 10, 12 and 1 2-B, and A-F. In a particular embodiment, a recombinant cell provided herein contains heterologous nucleic acid comprising a uPA, SNCG, IDE, KNSL1, TNFRSF6 or LIPA nucleic acid molecule described herein in the “Nucleic Acid Molecules”, “Primers, Probes and Antisense Nucleic Acids” and/or the “cDNAs” sections set forth herein. In another embodiment, a recombinant cell provided herein contains heterologous nucleic acid containing a uPA, SNCG, IDE, KNSL1, TNFRSF6 or LIPA gene or portion(s) thereof that includes one or more polymorphisms associated individually and/or in combination with a uPA, SNCG, IDE, KNSL1, TNFRSF6 or LIPA-mediated disease or disorder. In a further embodiment, a recombinant cell provided herein contains heterologous nucleic acid containing a uPA, SNCG, IDE, KNSL1, TNFRSF6 or LIPA gene or portion(s) thereof that includes one or more polymorphisms associated individually and/or in combination with a neurodegenerative disease or disorder. In particular embodiments, the neurodegenerative disease is Alzheimer's disease. In a yet further embodiment, the neurodegenerative disease is Alzheimer's disease with an age of onset that is greater than or equal to about 50 years, or greater than or equal to about 60 years, or greater than or equal to about 65 years.

[0735] In an exemplary particular embodiment, a recombinant cell provided herein contains heterologous nucleic acid containing a uPA gene or portion(s) thereof that includes one or more polymorphisms that occur at nucleotide positions corresponding to the following nucleotide positions in SEQ ID NO: 559 or 560: nucleotide 401 which is an A, T or C; nucleotide 515 which is a T, G or A; nucleotide 748 which is a T, C or A; and nucleotide 1 752 which is a C, G or A, or the complementary positions thereof. In a further particular embodiment, the heterologous nucleic acid contains a uPA gene or portion(s) thereof that includes one or more polymorphisms that occur at nucleotide positions corresponding to the following nucleotide positions in SEQ ID NO: 559 or 560, or the complementary positions thereof: nucleotide 401 which is an A; nucleotide 515 which is a T; nucleotide 748 which is a T; and nucleotide 1752 which is a C.

[0736] In another embodiment, a recombinant cell provided herein contains heterologous nucleic acid containing a uPA gene or portion(s) thereof that includes one or more polymorphisms associated individually and/or in combination with a uPA-mediated disease or disorder and that occur at nucleotide positions corresponding to the following nucleotide positions: nucleotide 9, 401, 464, 515, 748, 1229, 1356, 1752, 1942, 2127, 2543, 3029, 3169, 3799, 3947, 4808, 5287, 6532, 178, 1363, 1423, 1465, 1540, 2297, 2445, 2653, 3080, 3546, 3664, 3816, 4320, 4369, 4399, 4851, 5186, 5204, 5787, 6519, 6909, 7235, 7848 and 7908 in SEQ ID NO: 559 or 560 and nucleotides 79, 93, 256, 385 and 714 of SEQ ID NO: 563, or the complementary positions thereof.

[0737] In a particular embodiment, the recombinant cell contains heterologous nucleic acid containing a uPA gene or portion(s) thereof that includes one or more polymorphisms associated with a uPA-mediated disease or disorder in combination with one or more polymorphisms that occur at a nucleotide position corresponding to the following nucleotide positions in SEQ ID NO: 559 or 560, or the complementary positions thereof: nucleotide 401 which is an A, T or C, and in particular an A; nucleotide 515 which is a T, G or A, and in particular a T; nucleotide 748 which is a T, C or A, and in particular a T; and nucleotide 1752 which is a C, G or A, and in particular a C. In a further embodiment, the one or more polymorphisms associated with a uPA-mediated disease or disorder in combination with one or more of these polymorphisms at nucleotides corresponding to positions 401, 515, 748 and 1752 of SEQ ID NO: 559 or 560 occur at nucleotide positions corresponding to the following nucleotide positions: nucleotide 464, 1229, 1356, 1942, 2127, 2543, 3029, 3169, 3799, 3947, 4808, 5287, 6532, 178, 1363, 1423, 1465, 1540, 2297, 2445, 2653, 3080, 3546, 3664, 3816, 4320, 4369, 4399, 4851, 5186, 5204, 5787, 6519, 6909, 7235, 7848 and 7908 in SEQ ID NO: 559 or 560 and nucleotides 79, 93, 256, 385 and 714 of SEQ ID NO: 563, or the complementary positions thereof.

[0738] In another embodiment, a recombinant cell provided herein contains heterologous nucleic acid containing a uPA gene or portion(s) thereof that includes one or more polymorphisms associated individually and/or in combination with a neurodegenerative disease or disorder and that occur at nucleotide positions corresponding to the following nucleotide positions: nucleotide 9, 401, 464, 515, 748, 1229, 1356, 1752, 1942, 2127, 2543, 3029, 3169, 3799, 3947, 4808, 5287, 6532, 178, 1363, 1423, 1465, 1540, 2297, 2445, 2653, 3080, 3546, 3664, 3816, 4320, 4369, 4399, 4851, 5186, 5204, 5787, 6519, 6909, 7235, 7848 and 7908 in SEQ ID NO: 559 or 560 and nucleotides 79, 93, 256, 385 and 714 of SEQ ID NO: 563, or the complementary positions thereof. In a particular embodiment, the neurodegenerative disease is Alzheimer's disease. In a particular embodiment, the disease is Alzheimer's disease with an age of onset that is greater than or equal to about 50 years, or greater than or equal to about 60 years, or greater than or equal to about 65 years.

[0739] In a further embodiment, a recombinant cell provided herein contains heterologous nucleic acid containing a uPA gene or portion(s) thereof that includes one or more polymorphisms associated individually and/or in combination with a neurodegenerative disease or disorder and that occur at nucleotide positions corresponding to the following nucleotide positions of SEQ ID NO: 559 or 560: 9, 401, 464, 515, 748, 1229, 1356, 1752, 1942, 2127, 2543, 3029, 3169, 3799, 3947, 4808, 5287, and 6532, or the complementary positions thereof. In a yet further embodiment, a recombinant cell provided herein contains heterologous nucleic acid containing a uPA gene or portion(s) thereof that includes one or more polymorphisms associated individually and/or in combination with a neurodegenerative disease or disorder and that occur at nucleotide positions corresponding to the following nucleotide positions of SEQ ID NO: 559 or 560: 9, 401, 464, 515, 748, 1229, 1356, 1752, 1942, 21 27, 2543, 3029 and 5287, or the complementary positions thereof. In another embodiment, a recombinant cell provided herein contains heterologous nucleic acid containing a uPA gene or portion(s) thereof that includes one or more polymorphisms associated individually and/or in combination with a neurodegenerative disease or disorder and that occur at nucleotide positions corresponding to the following nucleotide positions of SEQ ID NO: 559 or 560: 3169, 3947 and 6532, or the complementary positions thereof. In a particular embodiment, the nucleotide at position 3169 is T, at position 3947 is C, and at position 6532 is T. In another embodiment, a recombinant cell provided herein contains heterologous nucleic acid containing a uPA gene or portion(s) thereof that includes one or more polymorphisms associated individually and/or in combination with a neurodegenerative disease or disorder and that occur at nucleotide positions corresponding to the following nucleotide positions: 178, 1363, 1423, 1465, 1540, 2297, 2445, 2653, 3080, 3546, 3664, 3816, 4320, 4369, 4399, 4851, 5186, 5204, 5787, 6519, 6909, 7235, 7848 and 7908 in SEQ ID NO: 559 or 560 and nucleotide positions 79, 93, 256, 385 and 714 of SEQ ID NO: 563, or the complementary positions thereof. In yet another embodiment, a recombinant cell provided herein contains heterologous nucleic acid containing a uPA gene or portion(s) thereof that includes one or more polymorphisms associated individually and/or in combination with a neurodegenerative disease or disorder and that occur at nucleotide positions corresponding to the following nucleotide positions: 178, 401, 464, 515 and 748 in SEQ ID NO: 559 or 560 and positions 79, 93, 256, 385 and 714 of SEQ ID NO: 563, or the complementary positions thereof. In a further embodiment, a recombinant cell provided herein contains heterologous nucleic acid containing a uPA gene or portion(s) thereof that includes one or more polymorphisms associated individually and/or in combination with a neurodegenerative disease or disorder and that occur at nucleotide positions corresponding to the following nucleotide positions of SEQ ID NO: 559 or 560: 401, 515 and 748, or the complementary positions thereof. In a further embodiment, a recombinant cell provided herein contains heterologous nucleic acid containing a uPA gene or portion(s) thereof that includes one or more polymorphisms associated individually and/or in combination with a neurodegenerative disease or disorder and that occur at nucleotide positions corresponding to the following nucleotide positions of SEQ ID NO: 559 or 560: 6519, 6532, 6909 and 7235, or the complementary positions thereof. In particular embodiments, the neurodegenerative disease is Alzheimer's disease. In a yet further embodiment, the neurodegenerative disease is Alzheimer's disease with an age of onset that is greater than or equal to about 50 years, or greater than or equal to about 60 years, or greater than or equal to about 65 years.

[0740] In particular embodiments of any of the above embodiments of the recombinant cells provided herein, the nucleotide at position 9 is A or C, at position 401 is G or A, at position 464 is G or position 464 is deleted, at position 515 is C or T, at position 748 is G or T, at position 1229 is T or G, at position 1356 is C or T, at position 1752 is T or C, at position 1942 is G or A, at position 2127 is G or A, at position 2543 is G or A, at position 3029 is G or A, at position 3169 is C or T, at position 3799 is T or C, at position 3947 is C or T, at position 4808 is C or T, at position 5287 is T or C, at position 6532 is T or C, at position 178 is A or G, at position 1363 is C or A, at position 1423 is G or T, at position 1465 is C or A, at position 1 540 is C or T, at position 2297 is C or T, at position 2445 is T or G, at position 2653 is G or A, at position 3080 is G or A, at position 3546 is C or G, at position 3664 is C or T, at position 3816 is A or C, at position 4320 is T or C, at position 4369 is G or A, at position 4399 is C or A, at position 4851 is G or A, at position 5186 is G or A, at position 5204 is G or A, at position 5787 is C or G, at position 6519 is C or G, at position 6909 is G or T, at position 7235 is G or position 7235 is deleted, at position 7848 is C or T, at position 7908 is A or C; and the nucleotide in SEQ ID NO: 563: at position 79 is T or C, at position 93 is a C or position 93 is deleted, at position 256 is G or T, at position 385 is C or T, at position 714-715 is the dinulceotide -GT- or the -GT- dinucleotide is deleted, or the complements thereof.

[0741] An isolated nucleic acid containing a uPA, SNCG, IDE, KNSL1, TNFRSF6 or LIPA gene variant sequence, or a portion or portions thereof, that includes the site(s) of one or more polymorphisms, may be introduced into a vector for transfer into host cells. A polymorphic uPA, SNCG, IDE, KNSL1, TNFRSF6 or LIPA gene or portion(s) thereof may be obtained in a number of ways. For example, a polymorphic uPA, SNCG, IDE, KNSL1, TNFRSF6 or LIPA gene or portion(s) thereof may be obtained by alteration, e.g., site-directed or amplification-mediated mutagenesis, of a wild-type or reference uPA, SNCG, IDE, KNSL1, TNFRSF6 or LIPA gene or cDNA, production of a synthetic nucleic acid using standard techniques known in the art or by genomic or cDNA cloning from a cell source. uPA, SNCG, IDE, KNSL1, TNFRSF6 or LIPA genes or cDNAs may be obtained by employing standard cloning procedures using nucleic acids isolated from cells that express uPA, SNCG, IDE, KNSL1, TNFRSF6 or LIPA protein (uPA, SNCG, IDE, KNSL1, TNFRSF6 or LIPA gene genomic clones may be obtained from any source of genomic DNA). Such cells include migratory cells, endothelial cells, chondrocytes and cells of the central nervous system, e.g., neurons and microglia. Human uPA protein is expressed, for example, in human embryonic kidney cells (HEK cells; see, e.g., U.S. Pat. Nos. 4,370,417 and 4,558,010), Hep3 cells (see, e.g., U.S. Pat. No. 5,242,819), the A431 cell line [Fabricant et al. (1977) Proc. Natl. Acad. Sci. U.S.A. 74:565-569 and Stoppelli et al. (1986) Cell 45:675-684], the HT1080 cell line [Andreasen et al. (1986) J. Biol. Chem. 261:7644-7651], the human glioblastoma cell line SNB19 [see, e.g., Mohanam et al. (2001) Clin. Cancer Res. 7:2519-2526] and human glioma cell lines U251, U87 and T98G [see, e.g., Nakada et al. (1999) J. Neuropathol. Exp. Neurol. 58:329-334].

[0742] The exogenous nucleic acid containing a polymorphic uPA, SNCG, IDE, KNSL1, TNFRSF6 or LIPA gene or portion(s) thereof that is used in the generation of recombinant cells provided herein contains, in particular embodiments, a sequence of nucleotides that ultimately provides for a product upon transcription of the uPA, SNCG, IDE, KNSL1, TNFRSF6 or LIPA gene or portion(s) thereof. The product can be, for instance, RNA and/or a protein translated from a transcript. For example, the product can be uPA, SNCG, IDE, KNSL1, TNFRSF6 or LIPA mRNA and/or a uPA, SNCG, IDE, KNSL1, TNFRSF6 or LIPA protein or a reporter molecule such as a reporter protein. If the polymorphic uPA, SNCG, IDE, KNSL1, TNFRSF6 or LIPA gene or portion(s) thereof being used in the generation of recombinant cells provided herein does not contain sequences that provide for transciption of the uPA, SNCG, IDE, KNSL1, TNFRSF6 or LIPA gene or portion(s) thereof, any appropriate transcription control sequences, such as a promoter, from any appropriate source which will provide for transciption of the uPA, SNCG, IDE, KNSL1, TNFRSF6 or LIPA gene or portion(s) thereof in the cell can be used. If the polymorphism(s) occur in a transcription control region of a uPA, SNCG, IDE, KNSL1, TNFRSF6 or LIPA gene, the polymorphic control region of the gene can be isolated or synthesized and operatively linked to nucleic acid encoding a reporter molecule, e.g., β-galactosidase, a fluorescent protein such as green fluorescent protein, or some other readily detectable molecule, or nucleic acid encoding a uPA, SNCG, IDE, KNSL1, TNFRSF6 or LIPA protein. The resultant fusion gene can be used as the transgene that is introduced into a host cell for use in development of recombinant cells therefrom. The patterns and levels of expression of the reporter or other molecule in the recombinant cells can be analyzed and compared to those in cells containing a fusion gene in which a wild-type or reference uPA, SNCG, IDE, KNSL1, TNFRSF6 or LIPA transcription control region sequence is operatively linked to nucleic acid encoding a reporter or other molecule.

[0743] In a particular embodiment, a recombinant cell provided herein contains heterologous nucleic acid containing one or more uPA gene transcription control regions that include one or more polymorphisms that occur at nucleotide positions corresponding to the following nucleotide positions: 178, 401, 464, 515, 748, 6519, 6532, 6909 and 7235 in SEQ ID NO: 559 or 560 and positions 79, 93, 256, 385 and 714 of SEQ ID NO: 563, or the complementary positions thereof. In further embodiments, the one or more uPA gene transcription control regions that include one or more polymorphisms occur at nucleotide positions corresponding to the following nucleotide positions in SEQ ID NO: 559 or 560: 1 78, 401, 464, 51 5, 748, or the complementary positions thereof. In particular embodiments, the nucleotide at position 178 is A or G, at position 401 is G or A, and in particular an A, at position 464 is G or position 464 is deleted, at position 515 is C or T, and in particular a T, and at position 748 is G or T, and in particular a T, or the complements thereof. In yet further embodiments, the one or more uPA gene transcription control regions that include one or more polymorphisms occur at nucleotide positions corresponding to the following nucleotide positions in SEQ ID NO: 559 or 560: 6519, 6532, 6909 and 7235, or the complementary positions thereof. In particular embodiments, the nucleotide at position 6519 is C or G, at position 6532 is T or C, at position 6909 is G or T, and at position 7235 is G, or the complementary positions thereof, or position 7235 is deleted.

[0744] The expression of isolated nucleic acids encoding a protein is typically achieved by incorporating a nucleic acid, e.g., DNA or cDNA, encoding the protein in operative linkage with a promoter (which can be constitutive and/or regulatable) into an expression vector. Expression vectors are used when expression of the protein in the host cell is desired. An expression vector includes vectors capable of expressing nucleic acids that are operatively linked with regulatory sequences, such as promoter regions, that are capable of affecting expression of such nucleic acids. Thus, an expression vector refers to a recombinant DNA or RNA construct, such as a plasmid, a phage, recombinant virus or other vector that, upon introduction into an appropriate host cell, results in expression of the cloned DNA. Appropriate expression vectors are well known to those of skill in the art and include those that are replicable in eukaryotic cells and/or prokaryotic cells and those that remain episomal or those which integrate into the host cell genome. Such plasmids for expression of polymorphic uPA, SNCG, IDE, KNSL1, TNFRSF6 or LIPA-encoding nucleic acids in eukaryotic host cells, particularly mammalian cells, include cytomegalovirus (CMV) promoter-containing vectors, such as pCMV5, the pSV2dhfr expression vectors, which contain the SV40 early promoter, mouse dhfr gene, SV40 polyadenylation and splice sites and sequences necessary for maintaining the vector in bacteria, and MMTV promoter-based vectors.

[0745] The vectors can be suitable for replication and integration in either prokaryotes or eukaryotes. Typical expression vectors contain transcription and translation terminators, initiation sequences, and promoters useful for regulation of the expression of the DNA encoding a protein. To obtain high level expression of a cloned gene, it is desirable to construct expression vectors which contain a strong promoter to direct transcription, a ribosome binding site for translational initiation, and a transcription/translation terminator. One of ordinary skill in the art would recognize that modifications can be made to a protein without diminishing its biological activity. Some modifications may be made to facilitate the cloning, expression, or incorporation of the targeting molecule into a fusion protein. Such modifications are well known to those of skill in the art and include, for example, a methionine added at the amino terminus to provide an initiation site, or additional amino acids (e.g., poly His) placed on either terminus to create conveniently located purification sequences. Restriction sites or termination codons can also be introduced. There are expression vectors that specifically allow the expression of functional proteins. One such vector, Plasmid 577, described in U.S. Pat. No. 6,020,122 and incorporated herein by reference, has been constructed for the expression of secreted antigens in a permanent cell line. This plasmid contains the following DNA segments: (a) a fragment of pBR322 containing bacterial beta-lactamase and origin of DNA replication; (b) a cassette directing expression of a neomycin resistance gene under control of HSV-1 thymidine kinase promoter and poly-A addition signals; (c) a cassette directing expression of a dihydrofolate reductase gene under the control of a SV-40 promoter and poly-A addition signals; (d) cassette directing expression of a rabbit immunoglobulin heavy chain signal sequence fused to a modified hepatitis C virus (HCV) E2 protein under the control of the Simian Virus 40 T-Ag promoter and transcription enhancer, the hepatitis B virus surface antigen (HBsAg) enhancer I followed by a fragment of Herpes Simplex Virus-1 (HSV-1) genome providing poly-A addition signals; and (e) a fragment of Simian Virus 40 genome late region of no function in this plasmid. All of the segments of the vector were assembled by standard methods known to those skilled in the art of molecular biology. Plasmids for the expression of uPA, SNCG, IDE, KNSL1, TNFRSF6 or LIPA proteins can be constructed by replacing the hepatitis C virus E2 protein coding sequence in plasmid 577 with a uPA, SNCG, IDE, KNSL1, TNFRSF6 or LIPA coding sequence or a fragment thereof (see above). The resulting plasmid can be transfected into CHO/dhfr-cells (DXB-111) (Uriacio, et al. (1980) PNAS 77:4451-4466; these cells are available from the A.T.C.C., 1 2301 Parklawn Drive, Rockville, Md. 20852, under Accession No. CRL 9096), using, for example, the cationic liposome-mediated procedure (P. L. Felgner et al. (1987) PNAS 84:7413-7417). Proteins can be secreted into the cell culture media.

[0746] Incorporation of cloned nucleic acids into a suitable vector, transfection of cells with a plasmid vector or a combination of plasmid vectors, each encoding one or more distinct proteins or with linear DNA, and selection of transfected cells are well known in the art (see, e.g., Sambrook et al. (1989) “Molecular Cloning: A Laboratory Manual,” 2d ed. Cold Spring Harbor Laboratory Press). Heterologous nucleic acid may be introduced into host cells by any method known to those of skill in the art, such as transfection with a vector containing the heterologous nucleic acid by CaPO₄ precipitation (see, e.g., Wigler et al. (1979) Proc. Natl. Acad. Sci. U.S.A. 76:1373-1376) or lipofectamine (Invitrogen, Carlsbad, Calif.). Recombinant cells can then be cultured under conditions whereby the polymorphic uPA, SNCG, IDE, KNSL1, TNFRSF6 or LIPA gene or portion(s) thereof is expressed. Suitable host cells include mammalian cells [e.g., HEK293, including but are not limited to, those described in U.S. Pat. No. 5,024,939 to Gorman (see, also, Stillman et al. (1985) Mol. Cell. Biol. 5:2051-2060); also, HEK293 cells available from ATCC under accession #CRL 1573], CHO, COS, BHKBI and Ltk⁻ cells, mouse monocyte macrophage P388D1 and J774A-1 cells (available from ATCC, Rockville, Md.) and others known to those of skill in this art, yeast cells, including, but not limited to, Pichia pastoris, Saccharomyces cerevisiae, Candida tropicalis, Hansenula polymorpha, human cells and bacterial cells, including, but not limited to, Escherichia coli. Xenopus oöcytes may also be used for expression of in vitro RNA transcripts of the DNA.

[0747] Heterologous nucleic acid may be stably incorporated into cells or may be transiently expressed using methods known in the art. Stably transfected mammalian cells may be prepared by transfecting cells with an expression vector having a selectable marker gene (such as, for example, the gene for thymidine kinase, dihydrofolate reductase, neomycin resistance, and the like), and growing the transfected cells under conditions selective for cells expressing the marker gene. To prepare transient transfectants, mammalian cells may be transfected with a reporter gene (such as the E. coli β-galactosidase gene) to monitor transfection efficiency. Selectable marker genes may not be included in the transient transfections because the transfectants are typically not grown under selective conditions, and are usually analyzed within a few days after transfection.

[0748] Heterologous nucleic acid may be maintained in the cell as an episomal element or may be integrated into chromosomal DNA of the cell. The resulting recombinant cells may then be cultured or subcultured (or passaged, in the case of mammalian cells) from such a culture or a subculture thereof. Methods for transfection, injection and culturing recombinant cells are known to the skilled artisan. Similarly, polymorphic proteins or fragments thereof may be purified using protein purification methods known to those of skill in the art. For example, antibodies or other ligands that specifically bind to the proteins may be used for affinity purification and immunoprecipitation of the proteins.

[0749] Expression of the exogenous polymorphic uPA, SNCG, IDE, KNSL1, TNFRSF6 or LIPA gene or portion(s) thereof in a recombinant cell can be assessed using standard techniques known to those of skill in the art and described herein and compared to the expression of a wild-type or reference uPA, SNCG, IDE, KNSL1, TNFRSF6 or LIPA transgene or portion(s) thereof in a similar cell. For example, initial screening may be accomplished by Southern blot analysis or nucleic acid amplification techniques to analyze transfected cells to determine whether the exogenous polymorphic uPA, SNCG, IDE, KNSL1, TNFRSF6 or LIPA gene or portion(s) thereof integrated into the genome of the host cell or is present as an extrachromosomal element. The level of mRNA expression from an exogenous polymorphic uPA, SNCG, IDE, KNSL1, TNFRSF6 or LIPA transgene or portion(s) thereof in the recombinant cells may be assessed using techniques that include, but are not limited to, Northern blot analysis of tissue samples, in situ hybridization analysis and RT-PCR (reverse transcriptase PCR). uPA, SNCG, IDE, KNSL1, TNFRSF6 or LIPA protein and activity may be detected and/or quantified using various techniques including immunoblot assays, zymography [see, e.g., Vasalli et al. (1984) J. Exp. Med. 159:1653-1668; Sappino et al. (1991) J. Clin. Invest. 88:1073-1079; and Zhou et aL (2000) EMBO J. 19:4817-4826], a plasminogen activation-based assay utilizing fluorogenic fibrin [Wu and Diamond (1995) Thromb. Haemost. 74:711-717] and a uPA, SNCG, IDE, KNSL1, TNFRSF6 or LIPA activity assay using a two-chain uPA, SNCG, IDE, KNSL1, TNFRSF6 or LIPA-specific fluorogenic substrate: glutamyl-glycyl-arginine-7-amino-4-methyl coumarin [Wolf et al. (1 993) J. Biol. Chem. 268:16327-16331]. Reporter molecule levels may be determined using assays designed for detection of the particular molecule.

[0750] Recombinant cells provided herein can comprise other genetic alterations or heterologous nucleic acids in addition to the presence of alleles of a uPA, SNCG, IDE, KNSL1, TNFRSF6 or LIPA gene or portion(s) thereof. For example, the genome can be altered to affect the function of the endogenous genes, contain marker genes, or contain other genetic alterations (e.g., alleles of other genes associated with disease). Thus, for example, a recombinant cell provided herein containing nucleic acid containing a polymorphic uPA, SNCG, IDE, KNSL1, TNFRSF6 or LIPA gene or portion(s) thereof may be one in which any endogenous uPA, SNCG, IDE, KNSL1, TNFRSF6 or LIPA gene has been deleted or changed such that the function and/or expression of the endogenous gene is altered. The alteration may be one which eliminates or significantly reduces endogenous uPA, SNCG, IDE, KNSL1, TNFRSF6 or LIPA protein and/or activity. The endogenous genome may also be altered to include, for example, a polymorphic gene or portion(s) thereof that is associated with a disease, such as a neurodegenerative disease or disorder. The neurodegenerative disease can be Alzheimer's disease. Thus, in a particular embodiment of the recombinant cells provided herein, the cell contains nucleic acid that contains an APOE4, APP, PS1, PS2 and/or Tau gene or portion(s) thereof. In particular, the nucleic acid contains an APOE4, APP, PS1, PS2 and/or Tau gene or portion(s) thereof that includes one or more polymorphisms that are associated with Alzheimer's disease.

[0751] Recombinant cells can be made containing any alleles of the uPA, SNCG, IDE, KNSL1, TNFRSF6 or LIPA gene, either individually or in combinations. Those of ordinary skill would be able to determine appropriate sequences to be utilized based on the sequences of the uPA, SNCG, IDE, KNSL1, TNFRSF6 or LIPA gene and cDNA provided herein. An example of a useful sequence is a sequence with one or more of the polymorphisms indicated in FIG. 9 and SEQ ID NO: 561. FIG. 9 and SEQ ID NO: 561 indicate the positions in a cDNA sequence that correspond to the following polymorphic regions regions described in Tables 12 and F for a uPA gene: 2e.5′utr (49), rs2227555 (59), rs2227580 (119), 4e.cds+173 (249), 6e.cds+422 (498), rs1050120 (718), rs2229301 (rs2227567 (767), 8e.cds+822 (898), rs1050122 (1156), rs1130957 (1174), rs1050124 (1500), 11e.utr+141 (1512), rs1804874 (1892) and rs2227574 (2220).

[0752] Q. Diagnostic and Prognostic Assays

[0753] Typically, an individual allelic variant of the uPA, SNCG, IDE, LIPA, TNFRSF6 and KNSL1 gene will not be used in isolation as an indicator or prognosticator of the disease or protection thereof, unless that allele represents a mutation in a disease gene which is involved in causing neurodegenerative disease, including Alzheimer's disease or a gene conferring protection from a neurodegenerative disease, including Alzheimer's disease. Polymorphisms that are not directly involved in the etiology of the disease may be in linkage-disequilibrium with a yet unidentified disease-causing or disease-protecting polymorphic locus and thus are useful for purposes of diagnostic and prognostic assays to indicate either a predisposition for, or protective effect from (“protection”), the disease.

[0754] As used herein, the term “protective” or “protection” with reference to an allele refers to an allele that is indicative of a decreased risk relative to the general population for a genetic disease, e.g., AD. The decreased risk associated with a protective allele may be identified as under-representation of the allele in cases relative to controls, and/or as a significant association between the allele and unaffected members of a family that contains affected members. A protective allele may be a variant of a DNA segment, such as a gene, that has a risk factor or disease allele.

[0755] An allelic pattern or haplotype will generally be used to indicate whether a subject is predisposed to the development or has a neurodegenerative disease, e.g., AD. Haplotypes useful for diagnostic and prognostic assays can be determined as previously described. In addition, the presence of a haplotype typically will only be one of a plurality of indicators that are used. The other indicators may be allelic variants or haplotypes in associated genes on other chromosomes, e.g., APOE4, and the manifestation of other risk factors of neurodegenerative disease and other evidence of neurodegenerative disease.

[0756] A subject is genotyped for the polymorphisms comprising the informative haplotype. Polymorphisms can be assayed individually or assayed simultaneously using multiplexing methods as described above or any other labelling method that allows different variants to be identified. In particular, variants of these genes may be assayed using kits (see below) or any of a variety microarrays known to those in the art. For example, oligonucleotide probes comprising the polymorphic regions surrounding any polymorphism in these genes may be designed and fabricated using methods such as those described in U.S. Pat. Nos. 5,492,806; 5,525,464; 5,695,940; 6,018,041; 6,025,136; WO 98/30883; WO 98/56954; W099/09218; WO 00/58516; WO 00/58519, or references cited therein. A subject's genotype may reflect the presence of the relevant haplotype. However, if this is not the case, haplotype information can be derived from the subject's genotype by utilizing an appropriate algorithm such as TRANSMIT (see sections on association and haplotype analysis at pages 60-70). Comparison of the subject's haplotype with a predetermined reference haplotype exhibiting association with neurodegenerative disease, e.g., AD, will indicate whether the subject has a predisposition or the occurrence of neurodegerative disease. Haplotyping can also be carried out, similarly, for association with protection.

[0757] An exemplary haplotype useful in the methods provided herein for determining a predisposition or occurrence of neurodegenerative disease, such as Alzheimer's disease, comprises multiple polymorphic regions of the IDE gene corresponding to nucleotides 2456, 3279, 3407 and 42943 of SEQ ID NO: 187. In one embodiment, the nucleotide in IDE at position 2456 of SEQ ID NO: 187 is G, at position 3279 of SEQ ID NO: 187 is T, at position 3407 of SEQ ID N0:187 is T, and at position 42943 of SEQ ID NO: 187 is T. In another embodiment, the nucleotide in IDE at position 2456 of SEQ ID NO: 187 is T, at position 3279 of SEQ ID NO: 187 is T, at position 3407 of SEQ ID NO: 187 is C, and at position 42943 of SEQ ID NO: 187 is T. In still a further embodiment, the nucleotide in IDE at position 2456 of SEQ ID NO: 187 is T, at position 3279 of SEQ ID NO: 187 is T, at position 3407 of SEQ ID NO: 187 is C, and at position 42943 of SEQ ID NO: 187 is C. In yet another embodiment, the nucleotide in IDE at position 2456 of SEQ ID NO: 187 is T, at position 3279 of SEQ ID NO: 187 is C, at position 3407 of SEQ ID NO: 187 is C, and at position 42943 of SEQ ID NO: 187 is C.

[0758] An exemplary haplotype useful in the methods provided herein for determining a predisposition or occurrence of neurodegenerative disease, such as Alzheimer's disease, comprises multiple polymorphic regions of the KNSL1 gene corresponding to nucleotides 132370, 133355, 147842 and 178981 of SEQ ID NO: 484. In one embodiment, the nucleotide(s) in KNSL1: at position 132370 of SEQ ID NO: 484 is A; between positions 133354-133355 of SEQ ID NO: 484 is a 6, 7 or 8 base pair poly-T insertion corresponding to -TTTTTT(T)(T)-; at positions 147842-147845 of SEQ ID NO: 484 is the 4 base pair insertion corresponding to -AGTT-; and between positions 178980-178981 of SEQ ID NO: 484 is the 5 base pair insertion corresponding to -AATTT-. In particular embodiments, the poly-T insertion can be 6 base pairs corresponding to -TTTTTT-; the poly-T insertion can be 7 base pairs corresponding to -TTTTTTT-; or the poly-T insertion can be 8 base pairs corresponding to -TTTTTTTT-.

[0759] An exemplary haplotype useful in the methods provided herein for determining protection from Alzheimer's disease, comprises multiple polymorphic regions of the LIPA gene corresponding to nucleotides 1852, 6063 and 7820 of SEQ ID NO: 468. In this embodiment, the nucleotide in LIPA at position 1852 of SEQ ID NO: 468 is A, at position 6063 of SEQ ID NO: 468 is G, and at position 7820 of SEQ ID NO: 468 is C.

[0760] R. Screening Assays for Modulators of uPA, SNCG, IDE, KNSL1, TNFRSF6 or LIPA and Biological Events Characteristic of Diseases and Disorders

[0761] Screening methods for identifying (1) molecules or agents that modulate the activity and/or expression of a uPA, SNCG, IDE, KNSL1, TNFRSF6 or LIPA protein, (2) molecules or agents that modulate Aβ protein levels, (3) candidate agents or molecules that modulate a biological event characterisitic of neurodegenerative diseases or disorders and (4) candidate agents or molecules that modulate a biological event characteristic of Alzheimer's disease are provided herein. The methods utilize cells and/or animals (in particular, non-human animals) that contain a nucleic acid, either endogenous or heterologous, containing a uPA, SNCG, IDE, KNSL1, TNFRSF6 or LIPA gene or a portion or portions thereof, such as, for example, a transcriptional control region (including, for example, a promoter and 3′ untranslated (UTR) sequences) and/or a coding sequence, including a cDNA sequence, of a uPA, SNCG, IDE, KNSL1, TNFRSF6 or LIPA gene. The uPA, SNCG, IDE, KNSL1, TNFRSF6 or LIPA gene or portion(s) thereof contains at least one polymorphic region and is thus referred to as a polymorphic uPA, SNCG, IDE, KNSL1, TNFRSF6 or LIPA gene or portion(s) thereof. In particular embodiments, the polymorphic uPA, SNCG, IDE, KNSL1, TNFRSF6 or LIPA gene is a human polymorphic uPA, SNCG, IDE, KNSL1, TNFRSF6 or LIPA gene.

[0762] Cells and/or animals used in these methods of identifying modulators that contain endogenous nucleic acid that contains a uPA, SNCG, IDE, KNSL1, TNFRSF6 or LIPA gene or portion(s) thereof that includes one or more polymorphisms of a uPA, SNCG, IDE, KNSL1, TNFRSF6 or LIPA gene can be identified through analysis of nucleic acids, such as the genomic DNA, of the cells or the animal for the presence of the particular nucleotide(s). Methods for the detection of particular polymorphisms are known in the art and are described herein. Cells and/or animals that contain a uPA, SNCG, IDE, KNSL1, TNFRSF6 or LIPA gene or portion(s) thereof that includes one or more polymorphisms of a uPA, SNCG, IDE, KNSL1, TNFRSF6 or LIPA gene as described herein also contain nucleic acid that encodes an endogenous uPA, SNCG, IDE, KNSL1, TNFRSF6 or LIPA protein. Transgenic animals and/or recombinant cells described and provided herein may also be used in the methods of identifying modulators. The transgenic animals and/or recombinant cells contain heterologous nucleic acid that contains a uPA, SNCG, IDE, KNSL1, TNFRSF6 or LIPA gene or portion(s) thereof that includes one or more polymorphisms of a uPA, SNCG, IDE, KNSL1, TNFRSF6 or LIPA gene. Cells which may be used in these methods include recombinant cells described and provided herein as well as cells from the transgenic animals which contain as a heterologous transgenic element nucleic acid that contains a uPA, SNCG, IDE, KNSL1, TNFRSF6 or LIPA gene or portion(s) thereof that includes one or more polymorphisms of a uPA, SNCG, IDE, KNSL1, TNFRSF6 or LIPA gene. The transgenic animals and/or recombinant cells used in these embodiments of the methods may contain nucleic acid that contains the one or more polymorphisms in a sequence or sequences that are operatively linked to nucleic acid encoding a reporter molecule or a uPA, SNCG, IDE, KNSL1, TNFRSF6 or LIPA or other protein or peptide.

[0763] In the methods for identifying molecules or agents that modulate the activity and/or expression of a uPA, SNCG, IDE, KNSL1, TNFRSF6 or LIPA protein, molecules or agents that modulate Aβ protein levels, or candidate agents that modulate a biological event characteristic of a disease or disorder, a cell or animal containing a uPA, SNCG, IDE, KNSL1, TNFRSF6 or LIPA gene or portion thereof that includes at least one polymorphic region of a uPA, SNCG, IDE, KNSL1, TNFRSF6 or LIPA gene is combined with a candidate agent. Combining includes any form of contacting the candidate agent with a cell or animal such as, e.g., physical application, injection, oral or intravenous administration, perfusion, addition to surrounding medium and transfection. The effect of the molecule or agent on the expression and/or activity of uPA, SNCG, IDE, KNSL1, TNFRSF6 or LIPA protein expressed by the cell or animal, on the levels of Aβ protein present in the cell and/or surrounding mediurm or animal, or on a biological event characteristic of a disease or disorder is then assessed.

[0764] The agents may be administered to animals, for example, in a variety of ways, orally, topically, parenterally e.g., subcutaneously, intraperitoneally, by viral infection, intravascularly, etc. Oral treatments are of particular interest. Depending upon the manner of introduction, the agents may be formulated in a variety of ways. The concentration of agent in the formulation may vary from about 0.1-100 wt. %.

[0765] The agents can be prepared in various forms, such as granules, tablets, pills, suppositories, capsules, suspensions, salves, lotions and the like. Pharmaceutical grade organic or inorganic carriers and/or diluents suitable for oral and topical use can be used to make up compositions containing the therapeutically-active compounds. Diluents known to the art include aqueous media, vegetable and animal oils and fats. Stabilizing agents, wetting and emulsifying agents, salts for varying the osmotic pressure or buffers for securing an adequate pH value, and skin penetration enhancers can be used as auxiliary agents.

[0766] Candidate agents encompass numerous chemical classes, though typically they are organic molecules preferably small organic compounds having a molecular weight of more than 50 and less than about 2,500 daltons. Candidate agents comprise functional groups necessary for structural interaction with proteins, particularly hydrogen bonding, and typically include at least an amine, carbonyl, hydroxyl or carboxyl group, preferably at least two of the functional chemical groups. The candidate agents often comprise cyclical carbon or heterocyclic structures and/or aromatic or polyaromatic structures substituted with one or more of the above functional groups. Candidate agents are also found among biomolecules including, but not limited to: peptides, saccharides, fatty acids, steroids, purines, pyrimidines, derivatives, structural analogs or combinations thereof.

[0767] Candidate agents are obtained from a wide variety of sources including libraries of synthetic or natural compounds. For example, numerous means are available for random and directed synthesis of a wide variety of organic compounds and biomolecules, including expression of randomized oligonucleotides and oligopeptides. Alternatively, libraries of natural compounds in the form of bacterial, fungal, plant and animal extracts are available or readily produced. Additionally, natural or synthetically produced libraries and compounds are readily modified through conventional chemical, physical and biochemical means, and may be used to produce combinatorial libraries. Known pharmacological agents may be subjected to directed or random chemical modifications, such as acylation, alkylation, esterification, acidification, etc. to produce structural analogs.

[0768] 1. Screening Methods For Identifying Molecules or Agents That Modulate The Activity and/or Expression of a uPA Protein

[0769] Molecules or agents that modulate the activity and/or expression of a uPA, SNCG, IDE, KNSL1, TNFRSF6 or LIPA protein can be used for a variety of purposes. For example, such compositions can be used to regulate (a) the activity of serine proteases, (b) the expression of a protein-encoding nucleic acid operatively linked to a uPA, SNCG, IDE, KNSL1, TNFRSF6 or LIPA gene transcripton control region, and/or (c) the generation of plasmin, and thus the degradation of fibrin and other protein aggregates such as amyloid Aβ protein.

[0770] In a particular embodiment of the methods for identifying molecules or agents that modulate the activity and/or expression of a uPA, SNCG, IDE, KNSL1, TNFRSF6 or LIPA protein, the cells or animals (in particular non-human animals) used in the method contain nucleic acid, either endogenous or heterologous, that contains a uPA, SNCG, IDE, KNSL1, TNFRSF6 or LIPA gene or portion thereof that includes one or more polymorphisms provided herein. In an exemplary embodiment, the one or more polymorphisms occur at a nucleotide position corresponding to the following nucleotide positions in SEQ ID NO: 559 or 560: nucleotide 401 which is an A, T or C; nucleotide 515 which is a T, G or A; nucleotide 748 which is a T, C or A; and nucleotide 1752 which is a C, G or A; in SEQ ID NO: 563 wherein the C nucleotide at position 93 is deleted, and in SEQ ID NO: 563 wherein the nucleotides at positions 714-715 are deleted. In a further particular embodiment, the nucleic acid contains a uPA gene or portion thereof that includes one or more polymorphisms that occur at a nucleotide position corresponding to the following nucleotide positions in SEQ ID NO: 52: nucleotide 401 which is an A; nucleotide 515 which is a T; nucleotide 748 which is a T; and nucleotide 1752 which is a C.

[0771] Cells and/or animals used in these embodiments of the method of identifying molecules or agents that modulate the activity and/or expression of a uPA, SNCG, IDE, KNSL1, TNFRSF6 or LIPA protein contain endogenous nucleic acid that contains a uPA, SNCG, IDE, KNSL1, TNFRSF6 or LIPA gene or portion thereof that includes one or more polymorphisms that occur at the nucleotide position corresponding to the above specified nucleotide positions in SEQ ID NOs: 559, 560 or 563 (uPA); 72 or 73 (SNCG); 186, 187 or 484 (IDE): 347, 348 or 484 (KNSL1); 402 or 403 (TNFRSF6); and 467 or 468 (LIPA)1 can be identified through analysis of the genomic DNA of the cells or the animal for the presence of the particular nucleotide(s). Methods for the detection of particular polymorphisms are known in the art and are described herein. Transgenic animals and/or recombinant cells described and provided herein may also be used in the methods of identifying molecules or agents that modulate the activity and/or expression of a uPA, SNCG, IDE, KNSL1, TNFRSF6 or LIPA protein. The transgenic animals and/or recombinant cells contain heterologous nucleic acid that contains a uPA, SNCG, IDE, KNSL1, TNFRSF6 or LIPA gene or portion thereof that includes one or more polymorphisms that occur at the nucleotide position corresponding to the above specified nucleotide positions in SEQ ID NOs: 559, 560 or 563 (uPA); 72 or 73 (SNCG); 186, 187 or 484 (IDE): 347, 348 or 484 (KNSL1); 402 or 403 (TNFRSF6); and 467 or 468 (LIPA). Cells which may be used in these methods include recombinant cells described and provided herein as well as cells from the transgenic animals which contain as a heterologous transgenic element nucleic acid that contains a uPA, SNCG, IDE, KNSL1, TNFRSF6 or LIPA gene or portion thereof that includes one or more polymorphisms that occur at the nucleotide position corresponding to the above-specified nucleotide positions in SEQ ID NOs: 559, 560 or 563 (uPA); 72 or 73 (SNCG); 186, 187 or 484 (IDE): 347, 348 or 484 (KNSL1); 402 or 403 (TNFRSF6); and 467 or 468 (LIPA). The transgenic animals and/or recombinant cells used in these embodiments of the methods may contain nucleic acid that contains the one or more polymorphisms in a sequence or sequences that are operatively linked to nucleic acid encoding a reporter molecule.

[0772] In methods of identifying molecules or agents that modulate the activity of a uPA, SNCG, IDE, KNSL1, TNFRSF6 or LIPA protein, the effect of the candidate molecule or agent on the expression and/or activity of uPA, SNCG, IDE, KNSL1, TNFRSF6 or LIPA protein expressed by the cell or animal can be assessed in a variety of ways. For example, after combining the candidate agent with the cell or animal, the timing and/or level of uPA, SNCG, IDE, KNSL1, TNFRSF6 or LIPA or reporter molecule mRNA expression or the mRNA stability may be evaluated using methods known in the art and described herein for detecting and quantifying mRNA levels in cells. The level of reporter or uPA, SNCG, IDE, KNSL1, TNFRSF6 or LIPA protein and of uPA, SNCG, IDE, KNSL1, TNFRSF6 or LIPA enzymatic and/or binding activity may also be evaluated using methods known in the art and described herein. These measurable aspects of uPA, SNCG, IDE, KNSL1, TNFRSF6 or LIPA or reporter molecule mRNA expression and protein expression and activity can be compared to the same aspects of the mRNA and protein of the same cells and animals in the absence of the candidate agent or to substantially similar cells that contain a different polymorphism (e.g., a wild-type genotype or reference genotype) at the polymorphic site(s) and that have been combined with the agent.

[0773] 2. Methods of Identifying Molecules or Agents That Modulate Aβ Protein Levels

[0774] Also provided herein are methods of identifying agents or molecules that modulate Aβ protein levels. Molecules or agents that modulate Aβ protein levels in cells and the extracellular medium can be used, for example, as candidate agents for the treatment of neurodegenerative diseases that involve deposition of amyloid, such as Alzheimer's disease. In a particular embodiment of the methods for identifying molecules or agents that modulate Aβ protein levels, the cells or animals (in particular non-human animals) used in the method contain nucleic acid, either endogenous or heterologous, that contains a uPA, SNCG, IDE, KNSL1, TNFRSF6 or LIPA gene or portion thereof that includes one or more polymorphisms provided herein. In an exemplary embodiment, the one or more polymorphisms occur at a nucleotide position corresponding to the following nucleotide positions in SEQ ID NO: 559 or 560: nucleotide 401 which is an A, T or C; nucleotide 515 which is a T, G or A; nucleotide 748 which is a T, C or A; and nucleotide 1752 which is a C, G or A; in SEQ ID NO: 563 wherein the C nucleotide at position 93 is deleted, and in SEQ ID NO: 563 wherein the nucleotides at positions 714-715 are deleted. In a further particular embodiment, the nucleic acid contains a uPA gene or portion thereof that includes one or more polymorphisms that occur at a nucleotide position corresponding to the following nucleotide positions in SEQ ID NO: 52: nucleotide 401 which is an A; nucleotide 515 which is a T; nucleotide 748 which is a T; and nucleotide 1752 which is a C.

[0775] In another embodiment of the methods for identifying molecules or agents that modulate Aβ protein levels, the cells or animals used in the method contain nucleic acid, either endogenous or heterologous, that contains a uPA gene or portion thereof that includes one or more polymorphisms that occur at a nucleotide position corresponding to the following nucleotide positions in SEQ ID NO: 559 or 560: 3169, 3947 and 6532. In a particular embodiment of this embodiment, the nucleotide in position 3169 is T, at position 3947 is C, and at position 6532 is T.

[0776] In a further embodiment of the methods for identifying molecules or agents that modulate Aβ protein levels, the cells or animals used in the method contain nucleic acid, either endogenous or heterologous, that contains a uPA gene or portion thereof that includes one or more polymorphisms that occur at a nucleotide position corresponding to the following nucleotide positions: nucleotide 9, 401, 464, 515, 748, 1229, 1356, 1752, 1942, 2127, 2543, 3029, 3169, 3799, 3947, 4808, 5287, 6532, 178, 1363, 1423, 1465, 1540, 2297, 2445, 2653, 3080, 3546, 3664, 3816, 4320, 4369, 4399, 4851, 5186, 5204, 5787, 6519, 6909, 7235, 7848 and 7908 in SEQ ID NO: 559 or 560 and nucleotides 79, 93, 256, 385 and 714 in SEQ ID NO: 563. In yet a further embodiment of the methods of identifying molecules or agents that modulate Aβ protein levels, the cells or animals used in the method contain nucleic acid, either endogenous or heterologous, that contains a uPA gene or portion thereof that includes one or more polymorphisms that occur at a nucleotide position corresponding to the following nucleotide positions of SEQ ID NO: 559 or 560: 9, 401, 464, 515, 748, 1229, 1356, 1752, 1942, 2127, 2543, 3029, 3169, 3799, 3947, 4808, 5287, and 6532. In a another embodiment, a cell or animal used in the method contains nucleic acid that contains a uPA gene or portion thereof that includes one or more polymorphisms that occurs at a nucleotide position corresponding to the following nucleotide positions of SEQ ID NO: 559 or 560: 9, 401, 464, 515, 748, 1229, 1356, 1752, 1942, 2127, 2543, 3029 and 5287.

[0777] In another embodiment, a cell or animal used in the methods of identifying a molecule or agent that modulates Aβ protein levels provided herein contains nucleic acid containing a uPA gene or portion thereof that includes one or more polymorphisms that occurs at a nucleotide position corresponding to the following nucleotide positions: 178, 1363, 1423, 1465, 1540, 2297, 2445, 2653, 3080, 3546, 3664, 3816, 4320, 4369, 4399, 4851, 5186, 5204; 5787, 6519, 6909, 7235, 7848 and 7908 in SEQ ID NO: 559 or 560 and nucleotide positions 79, 93, 256, 385 and 714 of SEQ ID NO: 563. In yet another embodiment, a cell or animal used in the methods provided herein contains nucleic acid containing a uPA gene or portion thereof that includes one or more polymorphisms that occurs at a nucleotide position corresponding to the following nucleotide positions: 178, 401, 464, 515 and 748 in SEQ ID NO: 559 or 560 and positions 79, 93, 256, 385 and 714 of SEQ ID NO: 563. In a further embodiment, a cell or animal used in the methods provided herein contains nucleic acid containing a uPA gene or portion thereof that includes one or more polymorphisms that occurs at a nucleotide position corresponding to the following nucleotide positions of SEQ ID NO: 559 or 560: 401, 515 and 748. In a further embodiment, a cell or animal used in the methods of identifying a molecule or agent that modulates Aβ protein levels provided herein contains nucleic acid containing a uPA gene or portion thereof that includes one or more polymorphisms that occurs at a nucleotide position corresponding to the following nucleotide positions of SEQ ID NO: 559 or 560: 6519, 6532, 6909 and 7235.

[0778] In particular embodiments of any of the above embodiments of the methods of identifying a molecule or agent that modulates Aβ protein levels provided herein, the nucleotide at position 401 is G or A, at position 464 is G or position 464 is deleted, at position 515 is C or T, at position 748 is G or T, at position 1 229 is T or G, at position 1356 is C or T, at position 1 752 is T or C, at position 1 942 is G or A, at position 2127 is G or A, at position 2543 is G or A, at position 3029 is G or A, at position 3169 is C or T, at position 3799 is T or C, at position 3947 is C or T, at position 4808 is C or T, at position 5287 is T or C, at position 6532 is T or C, at position 1 78 is A or G, at position 1363 is C or A, at position 1423 is G or T, at position 1465 is C or A, at position 1540 is C or T, at position 2297 is C or T, at position 2445 is T or G, at position 2653 is G or A, at position 3080 is G or A, at position 3546 is C or G, at position 3664 is C or T, at position 3816 is A or C, at position 4320 is T or C, at position 4369 is G or A, at position 4399 is C or A, at position 4851 is G or A, at position 5186 is G or A, at position 5204 is G or A, at position 5787 is C or G, at position 6519 is C or G, at position 6909 is G or T, at position 7235 is G or position 7235 is deleted, at position 7848 is C or T, at position 7908 is A or C; and the nucleotide in SEQ ID NO: 563: at position 79 is T or C, at position 93 is a C or position 93 is deleted, at position 256 is G or T, at position 385 is C or T, at position 714-715 is the dinulceotide -GT- or the -GT- dinucleotide is deleted.

[0779] In a further embodiment of the methods for identifying molecules or agents that modulate Aβ protein levels, the cells or animals used in the method contain nucleic acid, either endogenous or heterologous, that contains an IDE gene or portion thereof that includes one or more polymorphisms that occur at a nucleotide position corresponding to the following nucleotide positions: IDE nucleotide positions 2456, 3279, 3407, 42943, 62498, 69586, 107395, 112114, 116662, 17095, 17242, 33590, 38903, 43391, 45017, 68906, 68973, 73772, 74084, 83024, 83104, 89301, 105060, 108489, 111914, 113142, 113591, 114683, 117803 and 124565 of SEQ ID NO: 187; the complement of IDE nucleotide positions 820, 7066, 11758, 21270, 22225, 29294, 33452, 33708, 36982, 54862, 77786, 80594, 84792, 84997, 86682, 86857, 88511, 90437, 90593, 91650, 91870, 91878, 92011, 93618, 94344, 94714, 95671, 96324, 97302, 97370, 98253, 98276, 98385, 98646, 98814, 99597, 100378, 101029, 101265, 102465, 103289, 103967, 105793, 106076, 106453, 106600, 106995, 107851, 108434, 109096, 109399, 109483, 110870, 111189, 111972, 112627, 112629, 112631, 113407, 114444, 114482, 115473, 116681, 117226, 117600, 117802, 118223, 120011, 122260, 123165, 123424, 124352, 124501, 124692, 125113, 125159, 126568, 127166, 127598, 127600, 127609, 127614, 127623, 127662, 128053, 128261, 128289, 128291, 128393, 129444, 6078, 7106, 11758, 18267, 19581, 30078, 54862, 73841, 83448, 80304, 98276, 117802 and 129124 of SEQ ID NO: 484.

[0780] In particular embodiments of any of the above embodiments of the methods of identifying a molecule or agent that modulates Aβ protein levels provided herein, the IDE nucleotide at position 2456 is T or G, at position 3279 is T or C, at position 3407 is C or T, at position 42943 is T or C, at position 62498 is T or C, at position 69586 is T or C, at position 107395 is G or A, at position 112114 is G or A, and at position 116662 is T or A; and wherein the complementary nucleotide in SEQ ID NO: 484 at position 820 is A or T, at position 7066 is A or G, at position 11758 is T or C, at position 21270 is T or G, at position 22225 is A or T, at position 29294 is C or T, at position 33452 is G or T, at position 33708 is G or A, at position 36982 is C or T, at position 54862 is A or G, at position 77786 is C or A, at position 80594 is G or A, at position 84792 is T or C, at position 84997 is G or T, at position 86682 is C or T, at position 86857 is T or A, at position 88511 is A or G, at position 90437 is G or T, at position 90593 is G or A, at position 91650 is T or C, at position 91870 is G or A, at position 91878 is G or A, at position 92011 is C or T, at position 93618 is T or C, at position 94344 is C or T, at position 94714 is A or G, at position 95671 is A or G, at position 96324 is A or G, at position 97302 is G or A, at position 97370 is G or A, at position 98253 is T or C, at position 98276 is C or T, at position 98385 is A or G, at position 98646 is T or A, at position 98814 is G or A, at position 99597 is C or T, at position 100378 is T or C, at position 101029 is G or A, at position 101265 is C or T, at position 102465 is C or G, at position 103289 is T or G, at position 103967 is C or T, at position 105793 is A or G, at position 106076 is G or T, at position 106453 is C or T, at position 106600 is A or G, at position 106995 is G or A, at position 107851 is C or T, at position 108434 is G or C, at position 109096 is C or T, at position 109399 is C or T, at position 109483 is T or G, at position 110870 is G or A, at position 111189 is A or G, at position 111972 is G or A, at position 112627 is A or T, at position 112629 is A or T, at position 112631 is T or A, at position 113407 is C or G, at position 114444 is C or G, at position 114482 is G or C, at position 115473 is C or position 115473 is deleted, at position 116681 is G or T, at position 117226 is A or T, at position 117600 is A or G, at position 117802 is C or T, at position 118223 is G or C, at position 120011 is C or T, at position 122260 is A or G, at position 123165 is A or G, at position 123424 is G or A, at position 124352 is A or G, at position 124501 is C or T, at position 124692 is A or G, at position 125113 is T or A, at position 125159 is G or A, at position 126568 is G or C, at position 127166 is C or G, at position 127598 is T or C, at position 127600 is T or C, at position 127609 is T or C, at position 127614 is T or C, at position 127623 is T or C, at position 127662 is G or A, at position 128053 is G or A, at position 128261 is a repeat of -TAAA- occurring 6, 7, or 8 times beginning at position 128261, at position 128289 is A or T, at position 128291 is T or G, at position 128393 is T or G, at position 129444 is C or T.

[0781] In another embodiment of the methods for identifying molecules or agents that modulate Aβ protein levels, the cells or animals used in the method contain nucleic acid, either endogenous or heterologous, that contains an IDE gene or portion thereof that includes one or more polymorphisms that occur at a nucleotide position corresponding to the nucleotide positions 2456, 3279, 3407 and 42943 of SEQ ID NO: 187. In a particular embodiment of this embodiment, the nucleotide the nucleotide in IDE at position 2456 of SEQ ID NO: 187 is G, at position 3279 of SEQ ID NO: 187 is T, at position 3407 of SEQ ID NO: 187 is T, and at position 42943 of SEQ ID NO: 187 is T. In another embodiment, the nucleotide in IDE at position 2456 of SEQ ID NO: 187 is T, at position 3279 of SEQ ID NO: 187 is T, at position 3407 of SEQ ID NO: 187 is C, and at position 42943 of SEQ ID NO: 187 is T. In another embodiment, the nucleotide in IDE at position 2456 of SEQ ID NO: 187 is T, at position 3279 of SEQ ID NO: 187 is T, at position 3407 of SEQ ID NO: 187 is C, and at position 42943 of SEQ ID NO: 187 is C. In yet another embodiment, the nucleotide in IDE at position 2456 of SEQ ID NO: 187 is T, at position 3279 of SEQ ID NO: 187 is C, at position 3407 of SEQ ID NO: 187 is C, and at position 42943 of SEQ ID NO: 187 is C.

[0782] In methods of identifying molecules or agents that modulate Aβ protein levels, the effect of the candidate molecule or agent on Aβ protein levels in the cell, extracellular medium or animal can be assessed using a number of assays known in the art for quantifying Aβ, for example, immunological assays. Thus, for example, Aβ protein levels measured in a cell, extracellular medium or animal in the presence and absence of the candidate agent can be compared in determining the effect of the agent on the protein levels. Aβ protein levels may also be compared in cells or animals that have been combined with the agent and that are substantially similar except that the control cell or animal to which the screening assay cell or animal is being compared either does not contain nucleic acid containing a uPA, SNCG, IDE, KNSL1, TNFRSF6 or LIPA gene or portion thereof or contains nucleic acid that contains a uPA, SNCG, IDE, KNSL1, TNFRSF6 or LIPA gene or portion thereof that does not possess the same particular polymorphisms that the assay cell or animal possesses. In particular methods of identifying molecules or agents that modulate Aβ protein levels as provided herein, the cell or animal used in the method contains endogenous or heterologous nucleic acid that provides for increased expression of Aβ protein in the cell and/or extracellular medium or animal relative to a similar cell or animal that does not contain the nucleic acid. For example, such a nucleic acid may be one that encodes amyloid precursor protein.

[0783] 3. Methods of Identifying Molecules or Agents That Modulate a Biological Event and/or Behavioral Phenomenon Characteristic of Neurodegenerative Diseases or Disorders

[0784] Also provided herein are methods of identifying agents or molecules that modulate a biological event and/or behavioral phenomenon characteristic of a neurodegenerative disease or disorder. These methods provide a system for screening for ligands or substrates that modulate phenomena associated with a neurodegenerative disease or disorder. Molecules or agents that modulate a biological event characteristic of a neurodegenerative disease or disorder can be used, for example, as candidate agents for the treatment of neurodegenerative diseases and disorders. Of particular interest are screening assays for agents that have a low toxicity for human cells. For example, therapeutic peptides, peptidomimetics, or small molecules may be used to delay onset, lessen symptoms, or halt or delay progression of a neurodegenerative disease or disorder. Thus, the term “agent” as used herein with respect to methods of identifying agents that modulate a biological event and/or behavioral phenomenon characteristic of a disease or disorder is meant to include any molecule, e.g., protein or pharmaceutical, with the capability of affecting the molecular and clinical phenomena associated with a disease or disorder. Generally a plurality of assay mixtures are run in parallel with different agent concentrations to obtain a differential response to the various concentrations. Typically, one of these concentrations serves as a negative control, i.e. at zero concentration or below the level of detection.

[0785] Characteristics of neurodegenerative disease which have been widely described and are known to those of skill in the art, are numerous and include morphological, structural, biological and biochemical occurrences which can be pathophysiological aspects of neurodegenerative diseases. Such phenomena include, but are not limited to, senile plaques, neuritic plaques, and components of each, neurofibrillary tangles, tau protein and abnormal phosphorylation of tau protein, amyloid precursor protein (APP) and processing thereof, Aβ42 protein, α-, β-and γ-secretases, presenilin proteins, amyloid deposition, Lewy bodies, prions, apoptosis (see, e.g., Behl (2000) J. Neural Transm. 107:1325-1344), caspases, inflammation (see, e.g., McGeer and McGeer (1998) Exp. Gerontol. 33:371-378), excitotoxicity and excitotoxins, excessive nitric oxide production, oxidative stress (see, e.g., Beal (1998) Biochim. Biophys. Acta Mol. Cell Res. 1366:211-223, and Wallace et al. (1 998) Biofactors 7:187-190), proteases, protease inhibitors, neurotrophic factors, cytokines, calcium-dependent processes, signal transduction, altered ionic homeostasis, particularly calcium homeostasis, synaptic molecules, adhesion molecules, molecules involved in membrane turnover, cholesterol and lipid metabolism and transport, cytoskeletal molecules, neuronal and brain proteins, and cell necrosis. These characteristics may be assessed in the screening assays either singly or in any combination.

[0786] When animals are used in the methods of identifying a candidate molecule or agent that modulates a biological event and/or behavioral phenomenon characteristic of a neurodegenerative disease, the effect of the agent on behavioral phenomena associated with neurodegenerative disease, such as memory or learning deficits, may be assessed. For example, memory and learning can be tested in rodents by the Morris water maze (Stewart and Morris (1993) “Behavioral Neuroscience,” IRL Press, R. Saghal ed. 107) and the Y-maze (Brits et al. (1981) Brain Res. Bull. 6:71). In these methods, the agent or molecule is administered to animals. The response time in trials is measured and an improvement in memory and learning is demonstrated by a statistically significant decrease in the timed trials.

[0787] In a particular embodiment of the methods for identifying candidate molecules or agents that modulate a biological event or behavioral phenomenon characteristic of neurodegenerative disease, the cells or animals (in particular non-human animals) used in the method contain nucleic acid, either endogenous or heterologous, that contains a uPA, SNCG, IDE, KNSL1, TNFRSF6 or LIPA gene or portion thereof that includes one or more polymorphisms provided herein. In an exemplary embodiment, the one or more polymorphisms occur at a nucleotide position corresponding to the following nucleotide positions in SEQ ID NO: 559 or 560: nucleotide 401 which is an A, T or C; nucleotide 515 which is a T, G or A; nucleotide 748 which is a T, C or A; and nucleotide 1752 which is a C, G or A; in SEQ ID NO: 563 wherein the C nucleotide at position 93 is deleted, and in SEQ ID NO: 563 wherein the nucleotides at positions 714-715 are deleted. In a further particular embodiment, the nucleic acid contains a uPA gene or portion thereof that includes one or more polymorphisms that occur at a nucleotide position corresponding to the following nucleotide positions in SEQ ID NO: 52: nucleotide 401 which is an A; nucleotide 515 which is a T; nucleotide 748 which is a T; and nucleotide 1752 which is a C.

[0788] In another embodiment of the methods for identifying candidate molecules or agents that modulate a biological event or behavioral phenomenon characteristic of neurodegenerative disease, the cells or animals used in the method contain nucleic acid, either endogenous or heterologous, that contains a uPA gene or portion thereof that includes one or more polymorphisms that occur at a nucleotide position corresponding to the following nucleotide positions in SEQ ID NO: 559 or 560: 3169, 3947 and 6532. In a particular embodiment of this embodiment, the nucleotide in position 3169 is T, at position 3947 is C, and at position 6532 is T.

[0789] In a further embodiment of the methods for identifying candidate molecules or agents that modulate a biological event or behavioral phenomenon characteristic of neurodegenerative disease, the cells or animals used in the method contain nucleic acid, either endogenous or heterologous, that contains a uPA gene or portion thereof that includes one or more polymorphisms that occur at a nucleotide position corresponding to the following nucleotide positions: nucleotide 9, 401, 464, 515, 748, 1229, 1356, 1752, 1942, 2127, 2543, 3029, 3169, 3799, 3947, 4808, 5287, 6532, 178, 1363, 1423, 1465, 1540, 2297, 2445, 2653, 3080, 3546, 3664, 3816, 4320, 4369, 4399, 4851, 5186, 5204, 5787, 6519, 6909, 7235, 7848 and 7908 in SEQ ID NO: 559 or 560 and nucleotides 79, 93, 256, 385 and 714 in SEQ ID NO: 563. In yet a further embodiment of the methods of identifying candidate molecules or agents that modulate a biological event or behavioral phenomenon characteristic of neurodegenerative disease, the cells or animals used in the method contain nucleic acid, either endogenous or heterologous, that contains a uPA gene or portion thereof that includes one or more polymorphisms that occur at a nucleotide position corresponding to the following nucleotide positions of SEQ ID NO: 559 or 560: 9, 401, 464, 515, 748, 1229, 1356, 1752, 1942, 2127, 2543, 3029, 3169, 3799, 3947, 4808, 5287, and 6532. In a another embodiment, a cell or animal used in the method contains nucleic acid that contains a uPA gene or portion thereof that includes one or more polymorphisms that occurs at a nucleotide position corresponding to the following nucleotide positions of SEQ ID NO: 559 or 560: 9, 401, 464, 515, 748, 1229, 1356, 1752, 1942, 2127, 2543, 3029 and 5287.

[0790] In another embodiment, a cell or animal used in the methods of identifying a candidate molecule or agent that modulates a biological event or behavioral phenomenon characteristic of neurodegenerative disease provided herein contains nucleic acid containing a uPA gene or portion thereof that includes one or more polymorphisms that occurs at a nucleotide position corresponding to the following nucleotide positions: 178, 1363, 1423, 1465, 1540, 2297, 2445, 2653, 3080, 3546, 3664, 3816, 4320, 4369, 4399, 4851, 5186, 5204, 5787, 6519, 6909, 7235, 7848 and 7908 in SEQ ID NO: 559 or 560 and nucleotide positions 79, 93, 256, 385 and 714 of SEQ ID NO: 563. In yet another embodiment, a cell or animal used in the methods provided herein contains nucleic acid containing a uPA gene or portion thereof that includes one or more polymorphisms that occurs at a nucleotide position corresponding to the following nucleotide positions: 178, 401, 464, 515 and 748 in SEQ ID NO: 559 or 560 and positions 79, 93, 256, 385 and 714 of SEQ ID NO: 563. In a further embodiment, a cell or animal used in the methods provided herein contains nucleic acid containing a uPA gene or portion thereof that includes one or more polymorphisms that occurs at a nucleotide position corresponding to the following nucleotide positions of SEQ ID NO: 559 or 560: 401, 515 and 748. In a further embodiment, a cell or animal used in the methods of identifying a candidate molecule or agent that modulates a biological event or behavioral phenomenon characteristic of neurodegenerative disease provided herein contains nucleic acid containing a uPA gene or portion thereof that includes one or more polymorphisms that occurs at a nucleotide position corresponding to the following nucleotide positions of SEQ ID NO: 559 or 560: 6519, 6532, 6909 and 7235.

[0791] In particular embodiments of any of the above embodiments of the methods of identifying a candidate molecule or agent that modulates a biological event or behavioral phenomenon characteristic of neurodegenerative disease provided herein, the nucleotide at position 401 is G or A, at position 464 is G or position 464 is deleted, at position 515 is C or T, at position 748 is G or T, at position 1229 is T or G, at position 1356 is C or T, at position 1752 is T or C, at position 1942 is G or A, at position 2127 is G or A, at position 2543 is G or A, at position 3029 is G or A, at position 3169 is C or T, at position 3799 is T or C, at position 3947 is C or T, at position 4808 is C or T, at position 5287 is T or C, at position 6532 is T or C, at position 178 is A or G, at position 1363 is C or A, at position 1423 is G or T, at position 1465 is C or A, at position 1540 is C or T, at position 2297 is C or T, at position 2445 is T or G, at position 2653 is G or A, at position 3080 is G or A, at position 3546 is C or G, at position 3664 is C or T, at position 3816 is A or C, at position 4320 is T or C, at position 4369 is G or A, at position 4399 is C or A, at position 4851 is G or A, at position 5186 is G or A, at position 5204 is G or A, at position 5787 is C or G, at position 6519 is C or G, at position 6909 is G or T, at position 7235 is G or position 7235 is deleted, at position 7848 is C or T, at position 7908 is A or C; and the nucleotide in SEQ ID NO: 563: at position 79 is T or C, at position 93 is a C or position 93 is deleted, at position 256 is G or T, at position 385 is C or T, at position 714-715 is the dinulceotide -GT- or the -GT- dinucleotide is deleted.

[0792] Also provided are methods of identifying a candidate molecule or agent that modulates a biological event or behavioral phenomenon characteristic of neurodegenerative disease in which the cell or animal used in the methods contains nucleic acid containing a uPA, SNCG, IDE, KNSL1, TNFRSF6 or LIPA gene or portion thereof that includes one or more polymorphisms that are associated, individually and/or in combination, with a neurodegenerative disease or disorder. In particular embodiments of these methods, the cell or animal used in the method contains nucleic acid containing a uPA, SNCG, IDE, KNSL1, TNFRSF6 or LIPA gene or portion thereof that includes one or more polymorphisms that are associated, individually and/or in combination, with a neurodegenerative disease or disorder and that occurs at the above-specified nucleotide positions.

[0793] Further provided are any of the above methods for identifying a candidate molecule or agent that modulates a biological event or behavioral phenomenon characteristic of neurodegenerative disease wherein the neurodegenerative disease is Alzheimer's disease.

[0794] In particular methods of identifying candidate molecules or agents that modulate a biological event and/or behavioral phenomenon characteristic of a neurodegenerative disease, e.g., Alzheimer's disease, as provided herein, the cell or animal used in the method contains endogenous or heterologous nucleic acid that provides for increased expression of Aβ protein in the cell and/or extracellular medium or animal relative to a similar cell or animal that does not contain the nucleic acid. For example, such a nucleic acid may be one that encodes amyloid precursor protein.

[0795] In methods of identifying candidate molecules or agents that modulate a biological event or behavioral phenomenon characteristic of neurodegenerative disease, the effect of the candidate molecule or agent on a characteristic of a neurodegenerative disease may be assessed in a variety of ways, depending on the characteristic being evaluated. For example, the effect of a candidate agent on apoptosis, nitric oxide production, oxidative stress, proteases activity, calcium-dependent processes, signal transduction, ionic homeostasis, particularly calcium homeostasis, synaptic molecules, adhesion molecules, molecules involved in membrane turnover, cholesterol and lipid metabolism and transport, cytoskeletal molecules, neuronal and brain proteins, and/or cell necrosis may be assessed and compared in cells and/or animals in the presence and absence of the candidate agent. Numerous techniques for assessing such phenomena are known in the art. In addition, when animals are used in the methods, behavioral phenomena and tissue, in particular brain tissue, may be assessed and compared in the presence and absence of candidate agent. In methods of identifying candidate molecules or agents that modulate a biological event and/or behavioral phenomenon characteristic of Alzheimer's disease, amyloid deposition and clearance, as well as memory and learning capacity may particularly be evaluated in determining the effect of the agent on a characteristic of Alzheimer's disease. Depending on the particular assay, whole animals may be used, or cells derived therefrom. Cells may be freshly isolated from an animal, or may be immortalized in culture. Cells of particular interest are derived from neural tissue. For example, detection may utilize staining of cells or histological sections, performed in accordance with conventional methods. The antibodies of interest are added to the cell sample, and incubated for a period of time sufficient to allow binding to the epitope, usually at least about 10 minutes. The antibody may be labeled with radioisotopes, enzymes, fluorescers, chemiluminescers, or other labels for direct detection. Alternatively, a second stage antibody or reagent is used to amplify the signal. Such reagents are well known in the art. For example, the primary antibody may be conjugated to biotin, with horseradish peroxidase-conjugated avidin added as a second stage reagent. Final detection uses a substrate that undergoes a color change in the presence of the peroxidase. The absence or presence of antibody binding may be determined by various methods, including flow cytometry of dissociated cells, microscopy, radiography, scintillation counting, etc.

[0796] A number of assays are known in the art for determining the effect of a drug on animal behavior and other phenomena associated with a neurodegenerative disease, such as AD. Some examples are provided, although it will be understood by one of skill in the art that many other assays may also be used. The subject animals may be used by themselves, or in combination with control animals. Control animals may have, for example, a wild-type transgene that is not associated with AD.

[0797] The screen using transgenic animals can employ any phenomena associated with AD that can be readily assessed in an animal model. The screening for AD can include assessment of phenomena including, but not limited to: 1) analysis of molecular markers (e.g., levels of expression of APP gene products in brain tissue; presence/absence in brain tissue of various APP splice variants, isoforms, and mutants associated with AD; and formation of neurite plaques); 2) an enzyme, inhibitor or regulatory subunit in a pathway leading to the generation of a component of an amyloid plaque, e.g., Aβ, alpha-1-anti-chymotrypsin, cathepsin D, non-amyloid component protein, apolipoprotein E (APOE), apolipoprotein J, heat shock protein 70, complement components, alpha2-macroglobin, interleukin-6, proteoglycans and serum amyloid P; 3) assessment behavioral symptoms associated with memory and learning; 4) detection of neurodegeneration characterized by progressive and irreversible deafferentation of the limbic system, association neocortex, and basal forebrain (neurodegeneration can be measured by, for example, detection of synaptophysin expression in brain tissue) (see, e.g., Games et al. (1995) Nature 373:523-7). These phenomena may be assessed in the screening assays either singly or in any combination.

[0798] Preferably, the screen will include control values (e.g., the level of amyloid production in the test animal in the absence of test compound(s)). Test substances which are considered positive, i.e., likely to be beneficial in the treatment of AD, will be those which have a substantial affect upon an AD-associated phenomenon.

[0799] Methods for assessing these phenomena, and the affects expected of a candidate agent for treatment of AD are well known in the art. For example, methods for using transgenic animals in various screening assays for, for example, testing compounds for an affect on AD, are found in WO 9640896, published Dec. 19, 1996; WO 9640895, published Dec. 19, 1996; WO 9511994, published May 4, 1995 (describing methods and compositions for in vivo monitoring of A-beta; each of which is incorporated herein by reference with respect to disclosure of methods and compositions for such screening assays and techniques). Examples of assessment of these phenomena are provided below, but are not meant to be limiting.

[0800] As set forth herein, through use of the subject transgenic animals, cells derived therefrom, or cells in which nucleic acids encoding allelic variants have been introduced, one can identify ligands or substrates that modulate phenomena associated with neurodegenerative diseases, including AD, e.g., amyloid deposition, neurodegeneration, and/or behavioral phenomena, etc. Of particular interest are screening assays for agents that have a low toxicity for human cells.

[0801] Therapeutic peptides, peptidomimetics, or small molecules may be used to delay onset of neurodegenerative disease, lessen symptoms, or halt or delay progression of the disease. Such therapeutics may be tested in a transgenic animal model that expresses mutant protein, wild-type and mutant protein, or in an in vitro assay system. In addition, transgenic animal models and in vitro assay systems can utilize polymorphism that are not located in the protein coding region of uPA, SNCG, IDE, KNSL1, TNFRSF6 or LIPA genes but affect the expression of transcription, translation, RNA processing or RNA stability.

[0802] One such in vitro assay system measures the amount or activity of uPA, SNCG, IDE, KNSL1, TNFRSF6 or LIPA protein produced. Briefly, by way of illustration, a cell expressing mutant uPA, mutant SNCG, mutant IDE, mutant LIPA, mutant TNFRSF6, and/or mutant KNSL1 is cultured in the presence of a candidate therapeutic molecule. The protein expressed by the cell may be either wild-type or mutant protein. In either case, the amount of protein that is produced is measured from cells incubated with or without (control) the candidate therapeutic. Briefly, by way of example, cells are labeled in medium containing ³⁵S-methionine and incubated in the presence (or absence) of candidate therapeutic. Protein is detected in the culture supernatant by immunoprecipitation and SDS-PAGE electrophoresis or by ELISA. A statistically significant reduction of the amount or activity of the protein compared to the control signifies a therapeutic suitable for use in preventing or treating Alzheimer's disease.

[0803] Alternatively, transgenic animals expressing Alzheimer's disease protein may be used to test candidate therapeutics. uPA, SNCG, IDE, LIPA, TNFRSF6 or KNSL1 protein is measured or, if the animals exhibit other disease symptoms, such as memory or learning deprivation, an increase in memory or learning is measured. Memory and learning are tested in rodents by the Morris water maze (Stewart and Morris (1 993) “Behavioral Neuroscience,” IRL Press, R. Saghal ed. 107) and the Y-maze (Brits et al. (1981) Brain Res. Bull. 6:71). Therapeutics are administered to animals prior to testing. The response time in trials are measured and an improvement in memory and learning is demonstrated by a statistically significant decrease in the timed trials.

[0804] A wide variety of assays may be used for this purpose, including behavioral studies, determination of the localization of relevant proteins after administration, immunoassays to detect amyloid deposition, and the like. Depending on the particular assay, whole animals may be used, or cells derived therefrom. Cells may be freshly isolated from an animal, or may be immortalized in culture. Cells of particular interest are derived from neural tissue.

[0805] The term “agent” as used herein describes any molecule, e.g., protein or pharmaceutical, with the capability of affecting the molecular and clinical phenomena associated with AD or neurodegenerative disease. Generally a plurality of assay mixtures are run in parallel with different agent concentrations to obtain a differential response to the various concentrations. Typically, one of these concentrations serves as a negative control, i.e. at zero concentration or below the level of detection.

[0806] Candidate agents encompass numerous chemical classes, though typically they are organic molecules preferably small organic compounds having a molecular weight of more than 50 and less than about 2,500 daltons. Candidate agents comprise functional groups necessary for structural interaction with proteins, particularly hydrogen bonding, and typically include at least an amine, carbonyl, hydroxyl or carboxyl group, preferably at least two of the functional chemical groups. The candidate agents often comprise cyclical carbon or heterocyclic structures and/or aromatic or polyaromatic structures substituted with one or more of the above functional groups. Candidate agents are also found among biomolecules including, but not limited to: peptides, saccharides, fatty acids, steroids, purines, pyrimidines, derivatives, structural analogs or combinations thereof.

[0807] Candidate agents are obtained from a wide variety of sources including libraries of synthetic or natural compounds. For example, numerous means are available for random and directed synthesis of a wide variety of organic compounds and biomolecules, including expression of randomized oligonucleotides and oligopeptides. Alternatively, libraries of natural compounds in the form of bacterial, fungal, plant and animal extracts are available or readily produced. Additionally, natural or synthetically produced libraries and compounds are readily modified through conventional chemical, physical and biochemical means, and may be used to produce combinatorial libraries. Known pharmacological agents may be subjected to directed or random chemical modifications, such as acylation, alkylation, esterification, acidification, etc. to produce structural analogs.

[0808] For example, detection may utilize staining of cells or histological sections, performed in accordance with conventional methods. The antibodies of interest are added to the cell sample, and incubated for a period of time sufficient to allow binding to the epitope, usually at least about 10 minutes. The antibody may be labeled with radioisotopes, enzymes, fluorescers, chemiluminescers, or other labels for direct detection. Alternatively, a second stage antibody or reagent is used to amplify the signal. Such reagents are well known in the art. For example, the primary antibody may be conjugated to biotin, with horseradish peroxidase-conjugated avidin added as a second stage reagent. Final detection uses a substrate that undergoes a color change in the presence of the peroxidase. The absence or presence of antibody binding may be determined by various methods, including flow cytometry of dissociated cells, microscopy, radiography, scintillation counting, etc.

[0809] A number of assays are known in the art for determining the effect of a drug on animal behavior and other phenomena associated with AD. Some examples are provided, although it will be understood by one of skill in the art that many other assays may also be used. The subject animals may be used by themselves, or in combination with control animals. Control animals may have, for example, a wild-type transgene that is not associated with AD.

[0810] Pathological Studies

[0811] After exposure to the candidate agent, the animals are sacrificed and analyzed by immunohistology for either: 1) neuritic plaques and neurofibrillary tangles (NFTs) in the brain (AD model) and/or 2) amyloid deposition on cerebrovascular walls (CAA). The brain tissue is fixed (e.g., in 4% paraformiadehyde) and sectioned; the sections are stained with antibodies reactive with the APP and/or the beta peptide. Secondary antibodies conjugated with fluorescein, rhodamine, horse radish peroxidase, or alkaline phosphatase are used to detect the primary antibody. These experiments permit identification of amyloid plaques and the regionalization of these plagues to specific areas of the brain.

[0812] Sections are also stained with other antibodies diagnostic of Alzheimer's plaques, recognizing antigens such as Alz-50, tau, A2B5, neurofilaments, neuron-specific enolase, and others that are characteristic of Alzheimer's plaques. Staining with thioflavins and congo red can also be carried out to analyze co-localization of A-beta deposits within the neuritic plaques and NFTs of AD.

[0813] APP and A-beta expression can also be analyzed by a variety of methods. Messenger RNA (mRNA) can be isolated by the acid guanidinium thiocyanate phenol:chloroform extraction method (Chomczynski et al. (1987) Anal Biochem 162:156-1 59) from cell lines and tissues of transgenic animals to determine expression levels by Northern blots.

[0814] Radioactive or enzymatically labeled probes can be used to detect mRNA in situ. The probes are degraded approximately to 100 nucleotides in length for better penetration of cells. The procedure of Chou et al. (1 990) J Psychiatr Res 24:27-50 for fixed and paraffin embedded samples is briefly described below although similar procedures can be employed with samples sectioned as frozen material. Paraffin slides for in situ hybridization are dewaxed in xylene and rehydrated in a graded series of ethanols and finally rinsed in phosphate buffered saline (PBS). The sections are postfixed in fresh 4% paraformaldehyde. The slides are washed with PBS twice for 5 minutes to remove paraformaldehyde. Then the sections are permeabilized by treatment with a 20 μg/ml proteinase K solution. The sections are refixed in 4% paraformaldehyde, and basic molecules that could give rise to background probe binding are acetylated in a 0.1M triethanolamine, 0.3M acetic anhydride solution for 10 minutes. The slides are washed in PBS, then dehydrated in a graded series of ethanols and air dried. Sections are hybridized with antisense probe, using sense probe as a control. After appropriate washing, bound radioactive probes are detected by autoradiography or enzymatically labeled probes are detected through reaction with the appropriate chromogenic substrates.

[0815] Western Blot Analysis: Protein fractions can be isolated from tissue homogenenates and cell lysates and subjected to Western blot analysis as described by Harlow et al. (1 988) “Antibodies: A laboratory manual,” (Cold Spring Harbor, N.Y.); Brown et al. (1983) J. Neurochem 40:299-308; and Tate-Ostroff et al. (1989) Proc Natl Acad Sci 86:745-749. The protein fractions can be denatured in Laemmli sample buffer and electrophoresed on SDS-polyacrylamide gels. The proteins are then transferred to nitrocellulose filters by electroblotting. The filters are blocked, incubated with primary antibodies, and finally reacted with enzyme conjugated secondary antibodies. Subsequent incubation with the appropriate chromogenic substrate reveals the position of APP proteins.

[0816] Behavioral Studies of Transgenic Mice and Rats

[0817] Behavioral tests designed to assess learning and memory deficits can be employed. An example of such as test is the Morris Water maze (Morris (1981) Learn Motivat 12:239-260). In this procedure, the animal is placed in a circular pool filled with water, with an escape platform submerged just below the surface of the water. A visible marker is placed on the platform so that the animal can find it by navigating toward a proximal visual cue. Alternatively, a more complex form of the test in which there are no formal cues to mark the platform's location will be given to the animals. In this form, the animal must learn the platform's location relative to distal visual cues.

[0818] Alternatively, or in addition, memory and learning deficits can be studied using a 3 runway panel for working memory impairment (attempts to pass through two incorrect panels of the three panel-gates at four choice points) (Ohno et al. (1997) Pharmacol Biochem Behav 57:257-261).

[0819] In addition to the use of transgenic animals and cells, modulators can be screened or identified using methods familiar to those skilled in the art, such as in silico drug discovery procedures and rational drug design methodology.

[0820] uPA, SNCG, IDE, KNSL, TNFRSF6 and LIPA Functions SNCG

[0821] Gamma-synuclein (SNCG) increases the susceptibility of neurofilament-H to calcium-dependent proteases, and may participate in the regulation of neurofilament network integrity (Buchman et al. (1998) Nat Neurosci 1(2):101-103). Thus, assays directed toward measuring intact versus degraded neurofilament-H can be used to determine and monitor the function of a particular SNCG allelic variant.

[0822] IDE

[0823] Insulin-degrading enzyme (IDE) is a thiol metalloendopeptidase known to cleave insulin, glucagon, and other peptide hormones. Thus, assays directed toward measuring the cleavage of insulin, glucagon, and other peptide hormones can be used to determine and monitor the function of a particular IDE allelic variant.

[0824] KNSL

[0825] KNSL1 (also referred to as human Eg5) has been shown to be required proper assembly and dynamics of the mitotic spindle and for proper mitosis function. Thus, assays directed toward measuring mitotic spindle assembly and centrosome migration function can be used to determine and monitor the function of a particular KNSL1 allelic variant. See, e.g., Whitehead et al. (1998) J. Cell Sci. 111(17):2551-61; and Blangy et al. (1995) Cell 83(7):1159-69.

[0826] TNFRSF6

[0827] TNFRSF6 mediates apoptosis (programmed cell death). Any assay for examining apoptosis or components of such a pathway can be utilized to determine and monitor the function of a particular TNFRSF6 allelic variant. Other useful assays include binding of Fas to the TNFRSF6 ligand binding domain, functioning of the TNFRSF6 death domain, e.g., binding of fadd, formation of the death-inducing signaling complex of TNFRSF6, fadd and caspase-8, caspase-8 proteolytic activation, and monitoring induction of peripheral tolerance or antigen stimulated suicide of mature t-cells.

[0828] LIPA

[0829] LIPA is a triacylglycerol lipase and a cholesteryl esterase. Assays directed toward measuring acid lipase/cholesteryl ester hydrolase activity, intralysosomal lipid accumulations of cholesterol esters and triglycerides and cholesterol production (the effect of low density lipoprotein (LDL) uptake on the suppression of hydroxymethylglutaryl-CoA reductase and activation of endogenous cellular cholesteryl ester formation (Brown et al. (1976) J. Biol. Chem. 251:3277-3286)) can be used to determine and monitor the function of a particular LIPA allelic variant. For example, to measure enzyme activity, white blood cells from liver biopsies or cultured skin fibroblasts can be incubated in the presence of ¹⁴C-trioleylglycerol and the release of radioactivity from the compound is measured.

[0830] Therapeutic Agents Identified Using the Transgenic Animals

[0831] The therapeutic agents may be administered in a variety of ways, orally, topically, parenterally e.g., subcutaneously, intraperitoneally, by viral infection, intravascularly, etc. Oral treatments are of particular interest. Depending upon the manner of introduction, the compounds may be formulated in a variety of ways. The concentration of therapeutically active compound in the formulation may vary from about 0.1-100 wt. %.

[0832] The pharmaceutical compositions can be prepared in various forms, such as granules, tablets, pills, suppositories, capsules, suspensions, salves, lotions and the like. Pharmaceutical grade organic or inorganic carriers and/or diluents suitable for oral and topical use can be used to make up compositions containing the therapeutically-active compounds. Diluents known to the art include aqueous media, vegetable and animal oils and fats. Stabilizing agents, wetting and emulsifying agents, salts for varying the osmotic pressure or buffers for securing an adequate pH value, and skin penetration enhancers can be used as auxiliary agents.

[0833] Thus, depending on the effect of the alteration a specific treatment can be administered to a subject having such a mutation. For example, if the mutation results in decreased production of a protein, the subject can be treated by administration of a compound which increases synthesis, such as by increasing gene expression. Alternatively, if the mutation results in increased protein, the subject can be treated by administration of a compound which reduces protein production, e.g., by reducing gene expression or a compound which inhibits or reduces the activity of a protein.

[0834] S. Pharmacogenomics

[0835] It is likely that subjects having one or more different allelic variants of the uPA, SNCG, IDE, LIPA, TNFRSF6 or KNSL1 polymorphic regions will respond differently to drugs to treat neurodegenerative disease. Alleles of the uPA, SNCG, IDE, LIPA, TNFRSF6 or KNSL1 genes that associate with neurodegenerative disease will be useful alone or in conjunction with other genes associated with the development of neurodegenerative disease (e.g., APOE4) to predict a subject's response, either positive or negative, to a therapeutic drug. Multiplex primer extension assays or microarrays comprising probes for specific alleles are useful formats for determining drug response. A correlation between drug responses and specific alleles or combinations of alleles (haplotypes) of the uPA, SNCG, IDE, LIPA, TNFRSF6 and KNSL1 genes and other genes that associate with neurodegenerative disease can be shown, for example, by clinical studies wherein the response, either positive or negative, to specific drugs of subjects having different allelic variants of polymorphic regions of the uPA, SNCG, IDE, LIPA, TNFRSF6 and/or KNSL1 genes alone or in combination with allelic variants of other genes are compared. Thus, provided herein are methods for predicting a response of a subject to an agent used to treat a neurodegenerative disease or disorder which include a step of detecting in nucleic acid obtained from the subject the presence or absence of one or more polymorphisms, individually and/or in combinations, wherein the presence of the one or more polymorphisms, individually and/or in combination, is indicative of an increased or decreased likelihood that the treatment will be effective.

[0836] Such studies can also be performed using animal models, such as mice having various alleles and in which, e.g., the endogenous uPA, SNCG, IDE, LIPA, TNFRSF6 or KNSL1 genes have been inactivated such as by a knock-out mutation. Test drugs are then administered to the mice having different alleles and the response of the different mice to a specific compound is compared. Accordingly, assays, microarrays and kits are provided for determining the drug which will be best suited for treating a specific disease or condition in a subject based on the individual's genotype. For example, it will be possible to select drugs which will be devoid of toxicity, or have the lowest level of toxicity possible for treating a subject having a disease or condition, e.g., neurodegenerative disease or Alzheimer's disease.

[0837] Therapeutic agents that can be genetically profiled include, but are not limited to, ALCAR, Alpha-tocopherol (Vitamin E), Ampalex, AN-1 792 (AIP-001), Cerebrolysin, Daposone, Donepezil (Aricept), ENA-713 (Exelon), Estrogen replacement therapy, Galanthamine (Reminyl), Ginkgo Biloba extract, Huperzine A, Ibuprofen, Lipitor, Naproxen, Nefiracetam, Neotrofin, Memantine, Phenserine, Rofecoxib, Selegiline (Eldepryl), Tacrine (Cognex), Xanomeline (skin patch), Resperidone (Risperidol™), Neuroleptics, Benzodiazepenes, Valproate, Serotonin reuptake inhibitors (SRIs), Beta and Gamma Secretase Inhibitors, CX-516 (Ampalex), Statins and AF-102B (Evoxac).

[0838] Other therapeutic agents include those that are neuroprotective. Drugs with anti-oxidative properties, e.g., flupirtine, N-acetylcysteine, idebenone, melatonin, and also novel dopamine agonists (ropinirole and pramipexole) have been shown to protect neuronal cells from apoptosis and thus have been suggested for treating neurodegenerative disorders like AD or PD. Also, free radical scavengers, calcium channel blockers and modulators of certain signal transduction pathways that might protect neurons from downstream effects of the accumulation of A-Beta intracellularly and/or extracellularly. Also, other agents like non-steroidal anti-inflammatory drugs (NSAIDs) partly inhibit cyclooxygenase (COX) expression, as well as having a positive influence on the clinical expression of AD. Distinct cytokines, growth factors and related drug candidates, e.g., nerve growth factor (NGF), or members of the transforming growth factor-beta (TGF-beta) superfamily, like growth and differentiation factor 5 (GDF-5), are shown to protect tyrosine hydroxylase or dopaminergic neurones from apoptosis. CRIB (cellular replacement by immunoisolatory biocapsule) is a gene therapeutical approach for human NGF secretion, which has been shown to protect cholinergic neurones from cell death when implanted in the brain ((2000) Expert Opin Investig Drugs 9(4):747-64).

[0839] As set forth above, the prognostic methods described herein may also be used to determine whether a person will respond to a particular drug. This is useful, among other things, for matching particular drug treatments to particular patient populations to thereby exclude patients for whom a particular drug treatment may be less efficacious.

[0840] Provided herein is a computer assisted method of identifying a proposed treatment for neurodegenerative diseases (in a human subject). The method involves the steps of (a) storing a database of biological data for a plurality of patients, the biological data that is being stored include for each of said plurality of patients (i) a treatment type, (ii) the presence or absence of an allelic variant of one or more polymorphic regions of one or more genes selected from the group consisting of uPA, SNCG, IDE, KNSL1, LIPA and TNFRSF6 associated with a neurodegenerative disease (e.g., Alzheimer's Disease), and (iii) at least one disease progression measure for the neurodegenerative disease from which treatment efficacy may be determined; and then (b) querying the database to determine the dependence on said genetic polymorphism of the effectiveness of a treatment type in treating the neurodegenerative disease, to thereby identify a proposed treatment as an effective treatment for a patient carrying a particular polymorphism for the neurodegenerative disease, such as Alzheimer's Disease. In a particular embodiment, at least one of the polymorphic regions, or complements thereof, is selected from the group consisting of:

[0841] uPA nucleotide positions 9, 401, 464, 515, 748, 1229, 1356, 1752, 1942, 2127, 2543, 3029, 3169, 3799, 3947, 4808, 5287, 6532, 178, 1363, 1423, 1465, 1540, 2297, 2445, 2653, 3080, 3546, 3664, 3816, 4320, 4369, 4399, 4851, 5186, 5204, 5787, 6519, 6909, 7235, 7848, 7908 of SEQ ID NO: 559 or 560; and uPA nucleotide positions of SEQ ID NO: 563 consisting of 79, 93, 256, 385 and 714 of SEQ ID NO: 563;

[0842] SNCG nucleotide positions 560, 590, 617, 645, 915, 987, 1723, 1943, 1950, 3151, 3178, 3189, 3284, 3779, 4156, 4276, 4311, 4552, 4976, 4995, 5019, 5025, 5112, 5136, 5517, 5421, 5648, 2533, 3371, 4627, 4727, 4813 and 5200 of SEQ ID NO: 73;

[0843] IDE nucleotide positions 2456, 3279, 3407, 42943, 62498, 69586, 107395, 112114, 116662, 17095, 17242, 33590, 38903, 43391, 45017, 68906, 68973, 73772, 74084, 83024, 83104, 89301, 105060, 108489, 111914, 113142, 113591, 114683, 117803 and 124565 of SEQ ID NO: 187; the complement of IDE nucleotide positions 820, 7066, 11758, 21270, 22225, 29294, 33452, 33708, 36982, 54862, 77786, 80594, 84792, 84997, 86682, 86857, 88511, 90437, 90593, 91650, 91870, 91878, 92011, 93618, 94344, 94714, 95671, 96324, 97302, 97370, 98253, 98276, 98385, 98646, 98814, 99597, 100378, 101029, 101265, 102465, 103289, 103967, 105793, 106076, 106453, 106600, 106995, 107851, 108434, 109096, 109399, 109483, 110870, 111189, 111972, 112627, 112629, 112631, 113407, 114444, 114482, 115473, 116681, 117226, 117600, 117802, 118223, 120011, 122260, 123165, 123424, 124352, 124501, 124692, 125113, 125159, 126568, 127166, 127598, 127600, 127609, 127614, 127623, 127662, 128053, 128261, 128289, 128291, 128393, 129444, 6078, 7106, 11758, 18267, 19581, 30078, 54862, 73841, 83448, 80304, 98276, 117802 and 129124 of SEQ ID NO: 484;

[0844] KNSL1 nucleotide positions 300, 1152, 14235, 15104, 20815, 35719, 36738-36739, 41015, 42125, 45083, 45887, 56706, 56887, 58524, 62661 and 63802 of SEQ ID NO: 348; KNSL1 nucleotide positions 130876, 131378, 131616, 131620, 131688, 131998, 132004, 132370, 132697, 132968, 133355, 133806, 134030, 134291, 134661, 137087, 137142, 138396, 140665, 140736, 141173, 142056, 142777, 143025, 143729, 144484, 146181, 147051, 147322, 147707, 147842, 148080, 149026, 149044, 149389, 150003, 150384, 150454, 150686, 151343, 151961, 152119, 153791, 154328, 154513, 154639, 155049, 155114, 158040, 158895, 191284, 192272, 192698, 193706, 132370, 136968, 139284, 159167, 159403, 178748, 180149 and 180153 of SEQ ID NO: 484;

[0845] LIPA nucleotide positions 1197, 1307 to 1309, 1841, 1852, 2075, 6063, 6173, 6194, 7820, 25283, 28453 to 28465, 28543, 28746, 29904, 37861, 39834, 40018, 7219, 8242, 10114, 10606, 10688, 10729, 11559, 12031, 14497, 14729, 21145, 21329, 21404, 21429, 22246, 22354, 22621, 23802 and 25969 of SEQ ID NO: 468; and

[0846] TNFRSF6 nucleotide positions 1530, 1550, 14525, 14714, 18982, 19069, 20412, 20552, 23199, 23416, 24890, 26359, 199, 213, 843, 2967, 3103, 5335, 5345, 6074, 9374, 9907, 9936, 10937, 11200, 11279, 11359, 11503, 11511, 11587, 11694, 11905, 12193, 12208, 12238, 18511, 18567, 20640, 21585, 22439, 25081, 26878, 27670, 1926, 2269, 18934, 19227 and 22026 of SEQ ID NO: 403; and

[0847] polymorphic regions within 2 centimorgans thereof.

[0848] In one embodiment, treatment information for a patient is entered into the database (through any suitable means such as a window or text interface), genetic polymorphism information for that patient is entered into the database, and disease progression information is entered into the database. These steps are then repeated until the desired number of patients have been entered into the database. The database can then queried to determine whether a particular treatment is effective for patients carrying a particular polymorphism, not effective for patient carrying a particular polymorphism, etc. Such querying may be carried out prospectively or retrospectively on the database by any suitable means, but is generally done by statistical analysis in accordance with known techniques, as discussed further below.

[0849] Any suitable disease progression measure can be used, including but not limited to measures of motor function, measures of cognitive function, measures of dementia, etc., as well as combinations thereof. The measures are preferably scored in accordance with standard techniques for entry into the database. Measures are preferably taken at the initiation of the study, and then during the course of the study (that is, treatment of the group of patients with the experimental and control treatments), and the database preferably incorporates a plurality of these measures taken over time so that the presence, absence, or rate of disease progression in particular individuals or groups of individuals may be assessed.

[0850] An advantage of the methods produced is the relatively large number of genetic polymorphisms for Alzheimer's Disease (as set forth herein) that may be utilized in the computer-based method. Polymorphisms as set forth in the prior art, including but not limited to those described in Tables A-F herein and U.S. Pat. No. 5,508,167 to Roses et al., may also be used in combination with the polymorphisms provided herein. Thus, for example, instead of entering a single polymorphism into the database for each patient, two, three, four, five, six, seven, ten up to fifteen or more polymorphisms may be entered for each particular patient. The polymorphisms entered can either include or exclude polymorphisms of the prior art, and will be derived from one, two, three, five, seven or even ten or more polymorphisms as set forth in Tables 2, 4 and 4-B, 6 and 6-B, 8, 10, 12 and 1 2-B and A-F herein, and those within 2, 5, 10 or 15 centimorgans thereof, and optionally including additional polymorphisms of the prior art such as ApoE. Note that, for these purposes, entry of a polymorphism includes entry of the absence of a particular polymorphism for a particular patient. Thus the database can be queried for the effectiveness of a particular treatment in patients carrying any of a variety of polymorphisms, or combinations of polymorphisms, or who lack particular polymorphisms.

[0851] In general, the treatment type may be a control treatment or an experimental treatment, and the database preferably includes a plurality of patients having control treatments and a plurality of patients having experimental treatments. With respect to control treatments, the control treatment may be a placebo treatment or treatment with a known treatment for a neurodegenerative disease, such as Alzheimer's Disease, and preferably the database includes both a plurality of patients having control treatment with a placebo and a plurality of patients having control treatment with a known treatment for neurodegenerative diseases, such as Alzheimer's Disease.

[0852] Experimental treatments are typically drug treatments, which are compounds or active agents that are parenterally administered to the patient (i.e., orally or by injection) in a suitable pharmaceutically acceptable carrier.

[0853] Control treatments include placebo treatments (for example, injection with physiological saline solution or administration of whatever carrier vehicle is used to administer the experimental treatment, but without the active agent), as well as treatments with known agents for the treatment of a neurodegenerative disease, such as Alzheimer's Disease.

[0854] Administration of the treatments is preferably carried out in a manner so that the subject does not know whether that subject is receiving an experimental or control treatment. In addition, administration is preferably carried out in a manner so that the individual or people administering the treatment to the subject do not know whether that subject is receiving an experimental or control treatment.

[0855] Computer systems used to carry out the present invention may be implemented as hardware, software, or both hardware and software. Computer hardware and software systems that may be used to implement the methods described herein are known and available to those skilled in the art. See, e.g., U.S. Pat. No. 6,108,635 to Herren et al. and the following references cited therein: Eas, M. A.: A program for the meta-analysis of clinical trials, Computer Methods and Programs in Biomedicine, vol 53, no. 3 (July 1997); D. Klinger and M. Jaffe, An Information Technology Architecture for Pharmaceutical Research and Development, 14th Annual Symposium on Computer Applications in Medical Care, Nov. 4-7, pp. 256-260 (Washington, D.C. 1990); M. Rosenberg, “ClinAccess: An integrated client/server approach to clinical data management and regulatory approval”, Proceedings of the 21 st Annual SAS Users Group International Conference (Cary, N.C., Mar. 10-13, 1996). Querying of the database may be carried out in accordance with known techniques such as regression analysis or other types of comparisons such as with simple normal or t-tests, or with non-parametric techniques.

[0856] Accordingly, provided herein are methods of treating a subject for a neurodegenerative disease, such as Alzheimer's Disease, particularly late-onset Alzheimer's Disease, which method comprises the steps of:

[0857] determining the presence or absences of a preselected polymorphism for the neurodegenerative disease in said subject; and then administering to said subject a treatment effective for treating the neurodegenerative disease, e.g., Alzheimer's Disease, in a subject that carries said polymorphism. In particular embodiments, at least one preselected polymorphism is a polymorphism selected from Tables 2, 4 and 4-B, 6 and 6-B, 8, 10, 12 and 12-B, and to which a particular treatment has been matched. A treatment is preferably identified for that polymorphism by the computer-assisted method described above.

[0858] T. Kits

[0859] Kits are provided that contain at least one container means having disposed within at least one oligonucleotide, such as a probe, primer or antisense nucleic acid molecule, that includes a sequence of nucleotides that specifically hybridizes adjacent to or at a polymorphic region of a uPA, SNCG, IDE, KNSI1, TNFRSF6 and LIPA gene or cDNA. The kits have have numerous uses. For example, the kits may be used to detect the presence or absence in nucleic acid obtained from a subject of a uPA, SNCG, IDE, KNSI1, TNFRSF6 and LIPA gene polymorphism. The kits can be used to indicate whether a subject has a predisposition to, and/or protection against, developing a neurodegenerative disease (i.e. an altered level of risk for a neurodegenerative disease) and in particular Alzheimer's disease. Kits can also be used to confirm the diagnosis of a particular neurodegenerative disease. The information could also be used to optimize treatment of such individuals, as a particular genotype may be associated with a positive drug response.

[0860] Further provided are kits containing at least one container means having disposed within two or more oligonucleotides, such as primers, probes or antisense nucleic acid molecules, each of which contains a sequence of nucleotides that specifically hybridizes adjacent to or at a polymorphic region of a uPA, SNCG, IDE, KNSI1, TNFRSF6 and LIPA gene or cDNA that includes a polymorphism that is associated, individually or in combination with other polymorphism(s), with a neurodegenerative disease or disorder, and at least two of the oligonucleotides in the kits hybridize adjacent to or at different polymorphic regions. The kits can also contain at least one container means having disposed therein at least one oligonucleotide containing a sequence that specifically hybridizes adjacent to or at a polymorphic region of another gene associated with the disease. For example, in the case of a neurodegenerative disease, e.g., Alzheimer's disease, the other gene can be, but is not limited to, APOE4.

[0861] In further particular embodiments of the kits containing at least one container means having disposed therein two or more oligonucleotides, each of which contains a sequence of nucleotides that specifically hybridizes adjacent to or at a polymorphic region of a uPA, SNCG, IDE, KNSI1, TNFRSF6 and LIPA gene wherein the polymorphic region includes a polymorphism associated individually and/or in combination with other polymorphism(s) with a neurodegenerative disease or disorder, the neurodegenerative disease or disorder is Alzheimer's disease. In particular embodiments, the disease is Alzheimer's disease with an onset age greater than or equal to about 50 years, or greater than or equal to about 60 years, or greater than or equal to about 65 years. In yet further embodiments, the association between the polymorphism, individually and/or in combination with other polymorphism(s), and Alzheimer's disease yields a positive result in a family-based test for association. In particular embodiments, the positive result is a P value less than or equal to 0.05 or the positive result is a P value less than 0.05. In further embodiments, the P value is a value obtained after correction in which the probability value required to give significance is divided by the number of tests conducted. In still furhter embodiments, the association between the polymorphism, individually and/or in combination with other polymorphism(s), and Alzheimer's disease yields a result in a family-based test for association that is indicative of linkage disequilibrium between the one or more polymorphisms and an allele associated with Alzheimer's disease.

[0862] Further provided are kits containing at least one container means having disposed therein two or more oligonucleotides, each of which contains a sequence of nucleotides that specifically hybridizes adjacent to or at a polymorphic region of a uPA, SNCG, IDE, KNSI1, TNFRSF6 and LIPA gene wherein the polymorphic region contains a polymorphism associated individually and/or in combination with other polymorphism(s) with a disease or disorder as follows: thrombosis, thrombolytic diseases, stroke, atherosclerosis, coronary artery disease, cardiovascular disease, cardiac disorders, myocardial infarction, cardiomyopathies, proliferative diseases, cancer, tumor angiogenesis, tumor metastasis, arthritis, rheumatic diseases or inflammatory diseases, including inflammatory joint diseases.

[0863] In another embodiment, the kits comprise at least one container means having disposed therein at least one probe or primer which is capable of hybridizing adjacent to or at a polymorphic region of uPA, SNCG, IDE, LIPA, TNFRSF6 or KNSL1 and thereby identifying whether the gene contains an allelic variant which is associated with increased susceptibility to or protection against developing a neurodegenerative disease or the presence of a neurodegenerative disease. The kits can also comprise at least one container means having disposed therein at least one probe or primer which specifically hybridizes adjacent to or at a polymorphic region of another gene associated with neurodegenerative disease.

[0864] In another embodiment, the kits can further comprise instructions for use in carrying out assays and interpreting results concerning assessing an altered level of risk for a neurodegenerative disease. Kits can also comprise other containers comprising one or more of the following: DNA amplification reagents, DNA polymerase, restriction enzymes, buffers, wash reagents and reagents capable of detecting the presence of bound nucleic acid probes. Examples of detection reagents include, but are not limited to, radiolabelled probes, enzymatic labeled probes (horse radish peroxidase, alkaline phosphatase) and affinity labeled probes (biotin, avidin, or strepdtavidin).

[0865] In detail, a compartmentalized kit includes any kit in which reagents are contained in separate containers. Such containers include small glass containers, plastic containers or strips of plastic or paper. Such containers allow the efficient transfer of reagents from one compartment to another compartment such that the samples and reagents are not cross-contaminated and the agents or solutions of each container can be added in a quantitative fashion from one compartment to another. Such containers will include a container which will accept the test sample, a container which contains the probe or primers used in the assay, containers which contain the reagents used to detect the hybridized probe, bound antibody, amplified product, or the like.

[0866] Types of detection reagents include labeled secondary probes, or in the alternative, if the primary probe is labeled, the enzymatic, or antibody binding reagents which are capable or reacting with the labeled probe. One skilled in the art will readily recognize that the disclosed probes and amplification primers can readily be incorporated into one of the established kit formats which are well known in the art.

[0867] Kits for amplifying a region of uPA, SNCG, IDE, LIPA, TNFRSF6 and/or KNSL1 genes, or other genes associated with neurodegenerative disorders comprise two primers which flank a polymorphic region of the gene of interest. For other assays, primers or probes hybridize to a polymorphic region or 5′ or 3′ to a polymorphic region depending on which strand of the target nucleic acid is used. For the SNCG gene the polymorphic regions include, but are not limited to, positions corresponding to positions 560, 590, 617, 645, 915, 987, 1723, 1943, 1950, 3151, 3178, 3189, 3284, 3779, 4156, 4276, 4311, 4552, 4976, 4995, 5019, 5025, 5112, 5136, 5517, 2533, 3371, 4627, 4727, 4813 and/or 5200 of SEQ ID NO: 73 or the complement thereof. For the IDE gene the polymorphic regions include, but are not limited to, positions corresponding to positions 2456, 3279, 3407, 42943, 62498, 69586, 107395, 112114, and/or 116662 of SEQ ID NO: 187, or the complement thereof, or corresponding to SEQ ID NO: 484 positions 820, 7066, 11758, 21270, 22225, 29294, 33452, 33708, 36982, 54862, 77786, 80594, 84792, 84997, 86682, 86857, 88511, 90437, 90593, 91650, 91870, 91878, 92011, 93618, 94344, 94714, 95671, 96324, 97302, 97370, 98253, 98276, 98385, 98646, 98814, 99597, 100378, 101029, 101265, 102465, 103289, 103967, 105793, 106076, 106453, 106600, 106995, 107851, 108434, 109096, 109399, 109483, 110870, 111189, 111972, 112627, 112629, 112631, 113407, 114444, 114482, 115473, 116681, 117226, 117600, 117802, 118223, 120011, 122260, 123165, 123424, 124352, 124501, 124692, 125113, 125159, 126568, 127166, 127598, 127600, 127609, 127614, 127623, 127662, 128053, 128261, 128289, 128291, 128393, and 129444, or the complement thereof. For the KNSL1 gene the polymorphic regions include, but are not limited to, positions corresponding to positions 300, 1152, 14235, 15104, 20815, 35719, 36738-36739, 41015, 42125, 45083, 45887, 56706, 56887, 58524, 62661 and/or 63802 of SEQ ID NO: 348, or to SEQ ID NO: 484 positions 130876, 131378, 131616, 131620, 131688, 131998, 132004, 132370, 132697, 132968, 133355, 133806, 134030, 134291, 134661, 137087, 137142, 138396, 140665, 140736, 141173, 142056, 142777, 143025, 143729, 144484, 146181, 147051, 147322, 147707, 147842, 148080, 149026, 149044, 149389, 150003, 150384, 150454, 150686, 151343, 151961, 152119, 153791, 154328, 154513, 154639, 155049, 155114, 158040, 158895, 191284, 192272, 192698, and 193706, or the complement thereof. For the TNFRSF6 gene the polymorphic regions include, but are not limited to, positions corresponding to positions 1530, 1550, 14525, 14714, 18982, 19069, 20412, 20552, 23199, 23416, 24890, 26359, 1926, 2269, 18934, 19227 and/or 22026 of SEQ ID NO: 403, or the complement thereof. For the LIPA gene the polymorphic regions include, but are not limited to, positions corresponding to positions 1197, 1307-1309, 1841, 1852, 2075, 6063, 6173, 6194, 7820, 25283, 28453-28465, 28543, 28746, 29904, 37861, 39834 and/or 40018 of SEQ ID NO: 468, or the complement thereof. Those of skill in the art can synthesize primers and probes which hybridize adjacent to or at the polymorphic regions described herein and other polymorphisms in genes associated with neurodegenerative diseases.

[0868] In another embodiment a kit contains at least one container means having disposed within, at least one oligonucleotide, such as a probe, primer or antisense nucleic acid molecule, containing a sequence of nucleotides that specifically hybridizes adjacent to or at a polymorphic region of a uPA gene spanning a nucleotide position, or the complementary position thereof, corresponding to positions selected from the group consisting of nucleotide positions 9, 401, 464, 515, 748, 1229, 1356, 1752, 1942, 2127, 2543, 3029, 3169, 3799, 3947, 4808, 5287, 6532, 178, 1363, 1423, 1465, 1540, 2297, 2445, 2653, 3080, 3546, 3664, 3816, 4320, 4369, 4399, 4851, 5186, 5204, 5787, 6519, 6909, 7235, 7848, and 7908 of SEQ ID NO: 559 or 560; and positions of SEQ ID NO: 563 consisting of 79, 93, 256, 385 and 714; and the complementary positions thereof. In another embodiment, the kit further comprises at least one other container means having disposed within at least one oligonucleotide, e.g., probe or primer, which specifically hybridizes at or adjacent to at least one polymorphic region of another gene associated with neurodegenerative disease. In a particular embodiment, the other gene is APOE4.

[0869] Yet other kits comprise at least one reagent necessary to perform an assay. For example, the kit can comprise an enzyme, such as a nucleic acid polymerase. Alternatively the kit can comprise a buffer or any other necessary reagent.

[0870] Yet other kits comprise microarrays of probes to detect allelic variants of uPA, SNCG, IDE, LIPA, TNFRSF6 and/or KNSL1 with Alzheimer's disease. The kits further comprise instructions for their use and interpreting the results.

[0871] U. Combinations

[0872] Provided herein are combinations of reagents for a number of uses. For example, the combinations may be used to detect the presence or absence in nucleic acid obtained from a subject of a uPA, SNCG, IDE, KNSL1, TNFRSF6 and LIPA gene polymorphism. Other uses of the combinations include, but are not limited to, indicating a predisposition to, the occurrence of and/or a level of risk for a disease or disorder, such as, for example, a neurodegenerative disease, e.g., Alzheimer's disease. The combinations also can be used to confirm a diagnosis of a particular disease. The combinations can be provided as a kit, which optionally includes instructions for using the reagents for the above-noted purposes. The reagents are provided in appropriate packaging, such as containers, blister packs, linked to solid supports and any other suitable packaging. Included among the components of the combinations are those described below for the kits. Such components include, but are not limited to, oligonucleotides, primers, probes, antisense nucleic acid molecules, mixtures of primers, mixtures of probes, and reagents for use with the probes and primers. Suitable primers and probes are described throughout the disclosure herein (see section entitled Probes, Primers and Antisense Nucleic acids and other Oligonucleotides, and, see the section entitled Kits).

[0873] In a particular embodiment, the combination contains two or more, or three or more, oligonucleotides, such as, for example, primers, probes and antisense nucleic acid molecules, wherein each oligonucleotide contains a sequence of nucleotides that specifically hybridizes adjacent to or at either strand of a polymorphic region provided herein of a uPA, SNCG, IDE, KNSL1, TNFRSF6 and LIPA gene or cDNA wherein the polymorphic region contains a polymorphism associated, individually and/or in combination with other polymorphisms, with a neurodegenerative disease or disorder, and at least two of the oligonucleotides, such as primers, probes or antisense molecules, hybridize adjacent to or at different polymorphic regions.

[0874] In particular embodiments of any of the above combinations, each oligonucleotide contains at least 10, 14, 15, 16, 17, 20, 30, 40, 50, 60, 70, 80, 90 or 100 contiguous nucleotides of a uPA, SNCG, IDE, KNSL1, TNFRSF6 and LIPA gene or cDNA provided herein, such as in the Sequence Listing.

[0875] In a particular embodiment of the combinations of oligonucleotides containing a sequence of nucleotides that specifically hybridizes adjacent to or at either strand of a polymorphic region of a uPA, SNCG, IDE, KNSL1, TNFRSF6 and LIPA gene or cDNA wherein the polymorphic region contains a polymorphism associated, individually and/or in combination with other polymorphisms, with a neurodegenerative disease or disorder, the disease is Alzheimer's disease. In a further particular embodiment, the disease is Alzheimer's disease with an onset age greater than or equal to about 50 years, or greater than or equal to about 60 years, or greater than or equal to about 65 years. In yet further particular embodiments of the combinations, the association between the polymorphism, individually and/or in combination with other polymorphism(s), and Alzheimer's disease yields a positive result in a family-based test for association. In particular embodiments, the positive result is a P value less than or equal to 0.05 or the positive result is a P value less than 0.05. In yet further embodiments, the P value is a value obtained after correction in which the probability value required to give significance is divided by the number of tests conducted. In further embodiments, the association between the polymorphism, individually and/or in combination with other polymorphism(s), and Alzheimer's disease yields a result in a family-based test for association that is indicative of linkage disequilibrium between the polymorphism and an allele associated with Alzheimer's disease.

[0876] V. Computer Readable Medium The nucleic acid sequences relating to and identifying uPA, SNCG, IDE, KNSL1, TNFRSF6 and LIPA gene polymorphisms represent a valuable information source with which to identify further sequences of similar identity and characterize individuals in terms of, for example, their identity, haplotype and other sub-groupings, such as susceptibility to treatment with particular drugs. These approaches are most easily facilitated by storing the sequence information in a computer readable medium and then using the information in standard macromolecular structure programs or to search sequence databases using state of the art searching tools such as GCG (Genetics Computer Group), BlastX, BlastP, BlastN, FASTA [Altschul et al. (1990) J. Mol. Biol. 215:403-410]. Thus, the nucleic acid sequences containing polymorphisms of a uPA, SNCG, IDE, KNSL1, TNFRSF6 and LIPA gene are particularly useful as components in databases useful for sequence identity, genome mapping, pharmacogenetics and other search analyses. Generally, the sequence information relating to the nucleic acid sequences and polymorphisms of a uPA, SNCG, IDE, KNSL1, TNFRSF6 and LIPA gene may be reduced to, converted into or stored in a tangible medium such as a computer disk, preferably in a computer readable form. For example, chromatographic scan data or peak data, photographic scan or peak data, mass spectrographic data, sequence gel (or other) data.

[0877] Provided herein is a computer readable medium having stored thereon one or more nucleic acid sequences provided herein. Nucleic acid sequences provided herein include, for example, each of the nucleic acid sequences set forth herein, e.g., the “Nucleic Acid Molecules” section of the summary.

[0878] For example, a computer readable medium is provided containing and having stored thereon a member selected from the group consisting of: a nucleic acid sequence provided herein, a nucleic acid sequence containing a nucleic acid sequence provided herein, a nucleic acid sequence containing part of a nucleic acid sequence provided herein, wherein the part includes at least one of the uPA, SNCG, IDE, KNSL1, TNFRSF6 and LIPA gene polymorphisms provided herein, a set of nucleic acid sequences wherein the set includes at least one nucleic acid sequence provided herein, a data set containing or consisting of a nucleic acid sequence provided herein or a part thereof containing at least one of the uPA, SNCG, IDE, KNSL1, TNFRSF6 and LIPA gene polymorphisms provided herein. The computer readable medium can be any composition of matter used to store information or data, including, for example, floppy disks, tapes, chips, compact disks, digital disks, video disks, punch cards and hard drives.

[0879] Provided herein is a computer readable medium having stored thereon a nucleic acid sequence containing at least 14, at least 15, at least 16, at least 17, or at least 20 consecutive bases of a uPA, SNCG, IDE, KNSL1, TNFRSF6 and LIPA gene sequence, which sequence includes at least one polymorphism at a position corresponding to a nucleotide position set forth herein, or the complementary positions thereof.

[0880] A computer-based method is also provided for performing sequence identification, wherein the method includes the steps of providing nucleic acid sequence containing a polymorphism provided herein in a computer readable medium; and comparing said polymorphism-containing nucleic acid sequence to at least one other nucleic acid or polypeptide sequence to identify identity (homology), i.e., screen for the presence of a polymorphism. Such a method is particularly useful in pharmacogenetic studies and in genome mapping studies.

[0881] In another embodiment, there is provided a method for performing sequence identification, said method including the steps of providing a nucleic acid sequence containing at least 14, at least 15, at least 16, at least 17, or at least 20 consecutive bases of a uPA, SNCG, IDE, KNSL1, TNFRSF6 or LIPA gene sequence, which sequence includes at least one polymorphism provided herein, or the complementary positions thereof, in a computer readable medium; and comparing said nucleic acid sequence to at least one other nucleic acid sequence to identify identity. In a particular embodiment of this method, the nucleic acid sequence is one of the nucleic acid sequences provided herein.

[0882] The following examples are included for illustrative purposes only and are not intended to limit the scope of the invention. The practice of methods and development of the products provided herein employ, unless otherwise indicated, conventional techniques of cell biology, cell culture, molecular biology, transgenic biology, microbiology, recombinant DNA, and immunology, which are within the skill of the art. Such techniques are explained fully in the literature. See, for example, Sambrook, Fritsch and Maniatis (1989) “Molecular Cloning A Laboratory Manual,” 2d ed. Cold Spring Harbor Laboratory Press; “DNA Cloning,” (1985) Vols I and II D. N. Glover ed.; “Oligonucleotide Synthesis,” (1984) M. J. Gait ed.; Mullis et al. U.S. Pat. No. 4,683,195; “Nucleic Acid Hybridization,” (1984) B. D. Hames & S. J. Higgins eds.; “Transcription and Translation,” (1984) B. D. Hames & S. J. Higgins eds.; “Culture of Animal Cells,” (1987) R. I. Freshney, Alan R. Liss, Inc.; “Immobilized Cells and Enzymes,” (1986) IRL Press; B. Perbal (1984) “A Practical Guide To Molecular Cloning“; The treatise, Methods In Enzymology,” Academic Press, Inc. (New York); “Gene Transfer Vectors For Mammalian Cells,” (1987) J. H. Miller and M. P. Calos eds. (Cold Spring Harbor Laboratory); “Methods In Enzymology,” Vols. 154 and 155 Wu et al. eds.; “Immunochemical Methods In Cell and Molecular Biology,” (1987) Mayer and Walker, eds. Academic Press (London); “Handbook of Experimental Immunology,” (1986) Vols I-IV D. M. Weir and C. C. Blackwell, eds.; “Manipulating the Mouse Embryo,” (1 986) Cold Spring Harbor Laboratory Press (Cold Spring Harbor, N.Y.).

[0883] The following examples are included for illustrative purposes only and are not intended to limit the scope of the invention.

### EXAMPLE 1

[0884] Linkage to Chromosome 10

[0885] Microsatellite markers on human chromosome 10 were analyzed for genetic linkage to AD. The analysis was conducted by genotyping genomic DNA samples from AD family members with respect to seven microsatellite markers and performing parametric and non-parametric analyses of genotyping data. Genetic linkage analysis has identified highly polymorphic markers with significant linkage to Alzheimer's disease on human chromosome 10 (10q23-24).

[0886] The genomic DNA utilized in the linkage analyses was from the full National Institute of Mental Health (NIMH) Genetics Initiative sample of AD family DNA (Blacker et al. (1997) Neurology 48:139-147). Through the NIMH Genetics Initiative, a national resource of clinical data and biomaterials (DNA samples) collected from individuals with AD has been established. AD pedigrees have been ascertained by three extramural sites (Massachusetts General Hospital/Harvard Medical School, University of Alabama and Johns Hopkins University) and data collection has been coordinated among the three sites by using a common protocol that includes uniform assessments and medical, neurologic and psychiatric histories.

[0887] In generating the NIMH sample, subjects were collected following a standardized protocol applying NINCDS/ADRDA (National Institute of Neurological and Communicative Disorders and Stroke/Alzheimer's Disease and Related Disorders Association) criteria for the diagnosis of AD (Blacker et al. (1997) Neurology 48:139; McKhann et al. (1984) Neurology 34:939). The diagnostic process in the NIMH AD Genetics Initiative includes a systematic and comprehensive examination of all available information from autopsy records, family history, medical records, and patient and/or informant interviews. Definite AD according to age-adjusted Khachaturian criteria is diagnosed on autopsy. Operational criteria for the clinical diagnosis of probable or possible AD following NINCDS-ADRDA Work Group guidelines have been developed and are implemented by the three sites. Case summaries for all subjects with a clinical diagnosis of probable or possible AD are reviewed by the 30 site principal investigators and a procedure has been implemented to establish a consensus diagnosis. Subjects are followed longitudinally to track changes in diagnoses and to compare diagnoses by autopsy.

[0888] Only families in which all sample affected had onset ages>50 years were included (n=435 families; n=1426 subjects, mean age of onset=72.5±7.7 years, range 50-97 years). The original sample included a total of 1 500 subjects from 449 families with two or more affected subjects per family. Families in which any sampled individual had an onset age less than 50 years (n=14 families and 74 individuals) were excluded, yielding 1426 individuals from 435 families for this analysis, including 993 affected individuals, 429 unaffected, and 4 with phenotype unknown. Over the 10 years that the NIMH sample has been followed, a clinical diagnosis of AD has been confirmed at autopsy in 94% of the cases. All DNA samples are stored in a centralized cell repository at Rutgers University, New Brunswick, N.J.

[0889] The results of the parametric two-point analyses of seven microsatellite markers on chromosome 10 in 435 AD families using a dominant model revealed significant evidence of linkage of AD to chromosome 10 around marker D10S583 (Zₘₐₓ=3.3) in a full sample and around marker D10S1671 in the late-onset sample (Zₘₐₓ=3.4). The results of the parametric two-point analyses using a recessive model were similar, with a maximum LOD score of 3.8 for marker D10S1671 in the late-onset sample.

[0890] The results of two-point non-parametric linkage analyses also revealed linkage of AD on chromosome 10q with the highest linkage scores (Zₗᵣ=Z scores for the likelihood ratio) provided by markers D10S583, D10S1710 and D10S1671 (Zₗᵣ scores of 2.8, 2.8 and 3.8, respectively, for the late-onset dataset). Multipoint non-parametric analyses generated maximum Zₗᵣ scores of 1.9 (p=0.029, full sample), 2.1 (p=0.02, late onset) and 2.15 (p=0.016, APOE ε4-negative) at marker D10S1710, which is located between the two markers (i.e., D10S583 and D10S1671) with the greatest linkage signals in the two-point analyses.

[0891] Marker D 10S583 was analyzed for association with AD using the Family-Based Association Test computer program (FBAT) (Rabinowitz and Laird (2000) Hum. Hered. 50:211-223) to determine if it is within linkage disequilibrium range of an underlying disease gene. The analyses were based on estimated empirical variances (to account for the presence of linkage) (Lake et al. (2000) Am. J. Hum. Genet. 67:1515-1525) as implemented in FBAT (Version 1.0, 1999). Although the multiallelic test on all 11 alleles for marker D10S583 was not significant (p=0.15), the diallelic test revealed significant association of the 211-bp allele with an allele that is protective against AD (nominal p=0.004, Bonferroni corrected p=0.04).

[0892] The results of the linkage and association analyses of markers on human chromosome 10 indicate the presence of multiple, e.g., two, loci underlying AD on chromosome 10; at least one DNA segment that causes AD or confers increased susceptibility to AD, as well at least one DNA segment that is protective against AD. A protective allele generally has a counterpart disease risk allele.

[0893] Sequencing of regions of chromosome 10 was carried out to identify mutations that may be responsible for the observed linkage peaks. Candidate genes were selected by proximity to markers D10S583 and D10S1671 on chromosome 10. Other factors considered in the selection of candidate genes included physiological relevance to the disease and expression in brain. Based on these criteria, six candidate genes were chosen for sequencing: uPA, SNCG, IDE, KNSL1, TNFRSF6 and LIPA. High throughput genomic DNA sequencing of candidate genes in DNA samples obtained from the NIMH led to the discovery of novel polymorphisms in these genes and surrounding regions in chromosome 10.

### EXAMPLE 2

[0894] Sequencing of SNCG Candidate Gene

[0895] The nucleotide sequence of the SNCG gene in two sets of human genomic DNA samples was determined. The “SNCG” set was derived from nine members of three families that showed Alzheimer's disease (AD) linkage to D 10S583 and association with a silent mutation in SNCG exon 3 (NCBI reference SNP number rs760113; P=0.02 in SDT). The “D10-Top10” set was derived from 10 members of three families with the highest scores for AD linkage to genetic marker D10S583. Each set contained individuals both affected and unaffected with AD. Seven of the SNCG and all of the D10-Top10 samples were sequenced in this study.

[0896] The 5 SNCG exons, 4 introns, and approximately 500 bp each of 5′ and 3′ flanking sequence were amplified by PCR from each sample in 5 overlapping amplicons. The nucleotide sequence on both strands was determined using nested sequencing primers spaced at approximately 250-300-bp intervals. The PCR and sequencing primers (shown in Table 1) were designed using OLIGO6.0 software (Molecular Biology Insights, Inc., Cascade, Colo.). The nucleotide sequence template for primer design consisted of a human SNCG genomic sequence (GenBank accession AF04431 1) plus an additional 909 nucleotides of 5′ flanking sequence obtained from a BLAST search of the NCBI human EST database. The complete primer design template sequence is set forth in SEQ ID NO: 483. After sequencing, it was determined that the products obtained from the samples were more similar to sequence AF037207 (SEQ ID NO: 72) than AF044311. The above genomic sequences (GenBank accession Nos. AF044311 and AF037207) and two cDNA sequences corresponding to GenBank accession Nos. AF010126 and AF017256, were used to identify polymorphic regions (e.g., SNPs, and the like) in the SNCG gene.

[0897] SNCG PCR1-PCR5 products were amplified by polymerase chain reaction (PCR) from the SNCG set (SNCG-1, -2, and -5 through -9) and 10 samples from the D10-Top10 set (D10-1 through D10-8a). A mixture of 20 ul HotStarTaq Master Mix (QIAGEN, Valencia, Calif.), 12 ul DNA (2 ng/ul), and 8 ul primer mix (100 ng/ul each of the appropriate forward and reverse primers) was subjected to the following thermocycle: 15 min 95° C., 35×(15 sec 94° C., 45 sec T_{A}, 2 min 72° C.), 7 min 72° C., where T_{A}=62° C. (PCRs 1, 4 and 5) or 65° C. (PCRs 2-3). The PCR products were purified with the QIAquick PCR Purification Kit (QIAGEN, Valencia, Calif.) according to the manufacturer's protocol. Product concentrations were estimated using PicoGreen reagent (Molecular Probes, Inc., Eugene, Oreg.) according to the manufacturer's protocol. PCR1 products were diluted to 2.5 ng/ul; PCR2-5 products were diluted to 5.0 ng/ul. Sequencing reactions were performed with BigDye version 2 (Applied Biosystems, Foster City, Calif.) as follows: a mixture of 4 ul BigDye Reagent, 4 ul PCR product, and 2 ul sequencing primer (1.6 μM) was subjected to 30 cycles of (10 sec 96° C., 5 sec 50° C., 4 min 60° C.). Sequence products were detected and analyzed on an ABI 3700 automated sequencer (Applied Biosystems, Foster City, Calif.) according to the manufacturer's protocol. Sequence data were analyzed using Sequencher software (GeneCodes Corp., Ann Arbor, Mich.).

[0898] Primers used for PCR and sequencing are shown in Table 1.

TABLE 1

| | | | |
|---|---|---|---|
| NAME | SEQUENCE (5′→3′) | SEQ ID NO: | PURPOSE |

| | | | |
|---|---|---|---|
| SNCG01-1 | GGTTGGCTGCTCTCACCTAACAG | 1 | PCR primer |
| SNCG01-2 | GGGAGTAAGGTCTGGCGAAGGTA | 2 | PCR primer |
| SNCG01-3 | TAGGAAGCTGGGGACAAT | 3 | Sequencing primer |
| SNCG01-4 | TATGTGGCCCTGACCCCTAC | 4 | Sequencing primer |
| SNCG01-5 | CCAACCTGTCCCTCATTC | 5 | Sequencing primer |
| SNCG01-6 | CTGGTCTCTGCCTTCCTA | 6 | Sequencing primer |
| SNCG01-7 | CCGATGCCTCCTATTGAC | 7 | Sequencing primer |
| SNCG01-8 | TGGATGTCTTCAAGAAGG | 8 | Sequencing primer |
| SNCG01-9 | TCTGGCGAAGGTAACTGG | 9 | Sequencing primer |
| SNCG02-1 | CATCAATATTTCATCGGCGTCAAT | 10 | PCR primer |
| SNCG02-2 | GGGGTGGTTGTGGTGATTCC | 11 | PCR primer |
| SNCG02-3 | CATCGGCGTCAATAGGAG | 12 | Sequencing primer |
| SNCG02-4 | GGCGTCAATAGGAGGCATCG | 13 | Sequencing primer |
| SNCG02-5 | TTCGCCAGACCTTACTCC | 14 | Sequencing primer |
| SNCG02-6 | GGTGAGTGCCCAGTTACCTT | 15 | Sequencing primer |
| SNCG02-7 | CCGAGGAGGCCAAAGACA | 16 | Sequencing primer |
| SNCG02-8 | GGTAGCCAGCCCTGTCTGC | 17 | Sequencing primer |
| SNCG02-9 | TCCCTCCCCAGAGAGAAG | 18 | Sequencing primer |
| SNCG02-10 | ACACGGGAGCGGCTACAG | 19 | Sequencing primer |
| SNCG02-11 | GGCCAGAGCTGAGTCATT | 20 | Sequencing primer |
| SNCG02-12 | CCTCAGAAGCAGCAACAG | 21 | Sequencing primer |
| SNCG02-13 | CCTGCTCTCTCTTGTCCC | 22 | Sequencing primer |
| SNCG02-14 | CAAACACAACAGAACAGC | 23 | Sequencing primer |
| SNCG02-15 | GAGCTGTCAGCCCAGACCTC | 24 | Sequencing primer |
| SNCG02-16 | GGGCTCCTGCATCCTAGT | 25 | Sequencing primer |
| SNCG02-17 | CTCCAGGGCACCTCTGAT | 26 | Sequencing primer |
| SNCG02-18 | CCCATAGTGGCCGAGAAG | 27 | Sequencing primer |
| SNCG02-19 | GACCAAGGAGCAGGCCAAC | 28 | Sequencing primer |
| SNCG02-20 | GAGAGGACTGGGCAGGTT | 29 | Sequencing primer |
| SNCG02-21 | AGAGGACTGGGCAGGTCTGA | 30 | Sequencing primer |
| SNCG03-1 | TGTCCTCCCATAGTGGCCGAGAA | 31 | PCR primer |
| SNCG03-2 | CAGCCCAGGGAAGCCGACAC | 32 | PCR primer |
| SNCG03-3 | AGGCGGCATCACTCCACT | 33 | Sequencing primer |
| SNCG03-4 | GCCCATCTCATAGACAAGGA | 34 | Sequencing primer |
| SNCG03-5 | TTCCAGACCCGAATGCAG | 35 | Sequencing primer |
| SNCG03-6 | TTGTCTATGAGATGGGCTCC | 36 | Sequencing primer |
| SNCG03-7 | GACGGCTCTCAGCACTTA | 37 | Sequencing primer |
| SNCG03-8 | GCTTTCTTACCACTAGGG | 38 | Sequencing primer |
| SNCG03-9 | CGTGTGCGGCCCAATAGC | 39 | Sequencing primer |
| SNCG03-10 | ACAATGCGTAAAGCAGAG | 40 | Sequencing primer |
| SNCG03-11 | AGAGCCTCAGACTCCACC | 41 | Sequencing primer |
| SNCG03-12 | GGTGGCCTGGGCTAAGAT | 42 | Sequencing primer |
| SNCG03-13 | CAGGGAAGCCGACACTCT | 43 | Sequencing primer |
| SNCG04-1 | TAAGTGGTGGCCTGGGCTAAGAT | 44 | PCR primer |
| SNCG04-2 | CCTCGTGGCCTTGTTGTACTTG | 45 | PCR primer |
| SNCG04-3 | CTGGGCCTCCGTGTTCTC | 46 | Sequencing primer |
| SNCG04-4 | CCGCTCCCTCTCCTAGTTC | 47 | Sequencing primer |
| SNCG04-5 | TGGCTCCAAGGGCTCACT | 48 | Sequencing primer |
| SNCG04-6 | CTGGTGACACCCCAAAAC | 49 | Sequencing primer |
| SNCG04-7 | AGTGAGCCCTTGGAGCCAC | 50 | Sequencing primer |
| SNCG04-8 | GTGATTGCCCTGCACTCT | 51 | Sequencing primer |
| SNCG04-9 | TGCTGTGCTGGCGGGAGT | 52 | Sequencing primer |
| SNCG04-10 | CCAGAGTGCAGGGCAATC | 53 | Sequencing primer |
| SNCG04-11 | GCAGGTGCTGAGGCCAGAGT | 54 | Sequencing primer |
| SNCG04-12 | GCTCAGGGCCTTCCAACT | 55 | Sequencing primer |
| SNCG04-13 | TGGGGTTCACATAGGGACTC | 56 | Sequencing primer |
| SNCG04-14 | TGGCCTCAGAGTCCCTAT | 57 | Sequencing primer |
| SNCG04-15 | ACTCTAACCCCCACTCCAC | 58 | Sequencing primer |
| SNCG04-16 | GGCGTGCAATTCAGACAA | 59 | Sequencing primer |
| SNCG05-1 | CTCCCTGGCCTCAGAGTCCCTAT | 60 | PCR primer |
| SNCG05-2 | GCCCTGTTCCTCTTGCGACACT | 61 | PCR primer |
| SNCG05-3 | CGGGTATTGTCTGAATTG | 62 | Sequencing primer |
| SNCG05-4 | AAGTACAACAAGGCCACGAG | 63 | Sequencing primer |
| SNCG05-5 | GGGTCCCTACCAAGGAAC | 64 | Sequencing primer |
| SNCG05-6 | TCCAAAGAGAAAGAGGAA | 65 | Sequencing primer |
| SNCG05-7 | GGAAGTGGCAGAGGAGGTAG | 66 | Sequencing primer |
| SNCG05-8 | TGTAGCCCTCTAGTCTCC | 67 | Sequencing primer |
| SNCG05-9 | AGACTAGAGGGCTACAGG | 68 | Sequencing primer |
| SNCG05-10 | AGGAGTGGGCTCAAGTTT | 69 | Sequencing primer |
| SNCG05-11 | GAACGGGTTCAGCCTGTT | 70 | Sequencing primer |
| SNCG05-12 | GGAGCCCAGAACTCACAT | 71 | Sequencing primer |

[0899] SNCG PCR fragment SNCG-01 contains exon 1 and flanking sequence which includes the presumed promoter-containing region. SNCG PCR fragment SNCG-02 overlaps SNCG-01 and contains exons 1 through 3 and flanking sequence. SNCG PCR fragment SNCG-03 overlaps SNCG-02 and contains parts of exon 3 and intron 3. SNCG PCR fragment SNCG-04 overlaps SNCG-03 and contains additional intron 3 sequence. SNCG-05 overlaps SNCG-04 and contains the remainder of intron 3 plus exon 5 and flanking sequence. SNCG PCR fragment #1 was amplified from genomic DNA with primers SNCG01-1 and SNCG01-2 and sequenced with primers SNCG01-3 through -9 (see Table 1). SNCG PCR fragment #2 was amplified from genomic DNA with primers SNCG02-1 and SNCG02-2 and sequenced with primers SNCG02-3 through -21. SNCG PCR fragment #3 was amplified from genomic DNA with primers SNCG03-1 and SNCG03-2 and sequenced with primers SNCG03-3 through -13. SNCG PCR fragment #4 was amplified from genomic DNA with primers SNCG04-1 and SNCG04-2 and sequenced with primers SNCG04-3 through -17. SNCG PCR fragment #5 was amplified from genomic DNA with primers SNCG05-1 and SNCG05-2 and sequenced with primers SNCG05-3 through -12.

[0900] Polymorphic regions were discovered as samples contained nucleotides that differed from the reference nucleotide sequence corresponding to GenBank accession No. AF037207 plus an additional 175 nucleotides of 3′ flanking sequence corresponding to the reverse complement of nucleotides 235901-236075 of GenBank accession No. AC025039.4 (SEQ ID NO: 72) at specific nucleotide positions. Table 2 shows the polymorphic regions (e.g., SNPs, and the like) that were found along with the type of nucleotide polymorphic change detected relative to the SNCG reference sequence set forth as SEQ ID NO: 72. Table 2 also includes five putative SNPs (1e.CDS+9, 1e.CDS+37, 5e.3′UTR+80, 5e.3′UTR+99, and 5e.3′UTR+129) that were identified as differences between sequences in GenBank, but not yet confirmed experimentally.

TABLE 2
(SNCG Polymorphic Regions)

| | | | NUCLEOTIDE |
|---|---|---|---|
| POLYMORPHISM | POSITION IN | PUBLIC | CHANGE |
| NAME | SEQ ID NO:72 | DATABASE? | DETECTED |
| 1e.5′UTR − 19 | 590 | YES | A→C |
| 1i.D + 186 | 915 | NO | T→G |
| 1i.D + 258 | 987 | NO | C→A |
| 2i.A − 189 | 1723 | YES | A→G |
| 3e.CDS + 195 | 1943 | YES | G→C |
| 3i.D + 495 | 2533 | NO | T→G |
| 3i.D + 1112 | 3151 | NO | A→G |
| 31.D − 1139 | 3178 | NO | T→C |
| 3i.D + 1150 | 3189 | NO | T→C |
| 3i.D + 1245 | 3284 | NO | G→A |
| 3i.A − 1143 | 3371 | NO | A→C |
| 3i.A − 736 | 3779 | NO | Deletion of T |
| 3i.A − 359 | 4156 | NO | Insert G |
| 3i.A − 239 | 4276 | NO | T→A |
| 3i.A − 204 | 4311 | NO | C→T |
| 4i.D + 41 | 4627 | NO | T→G |
| 4i.D + 141 | 4727 | NO | A→G |
| 4i.A − 63 | 4813 | NO | A→C |
| 5e.3′UTR + 123 | 5019 | YES | C→T |
| 5e.3′UTR + 240 | 5136 | NO | T→A |
| ds + 31 | 5200 | NO | G→C |
| ds + 348 | 5517 | NO | T→C |

[0901] As shown in Table 2, the results indicated the detection of 18 polymorphic regions corresponding to SNPs, and single-nucleotide insertions and deletions, in the two sample sets, as well as five polymorphic regions identified by differences in reported GenBank sequences. Twelve of these polymorphic regions corresponding to SEQ ID NO: 73, positions: 915, 987, 2533, 3151, 3178, 3189, 3284, 3371, 3779, 4156, 4276, 4311, 4627, 4727, 4813, 5136, 5200 and 5517 have yet to be described in public databases or literature.

[0902] 5′UTR Sequence

[0903] The SNP corresponding to 1e.5′UTR-19 is located in the 5′ untranslated sequence and may affect, among other processes, translation initiation and RNA stability.

[0904] Intervening Sequences

[0905] The SNPs corresponding to 1i.D+186 and 1i.D+258 of Table 2 are positioned in an intron between exon 1 and exon 2. The SNP corresponding to 2i.A-189 of Table 2 is positioned in an intron between exons 2 and 3. The SNPs corresponding to 3i.D+1112, 3i.D+1139, 3i.D+1150, 3i.D+1245, 3i.A-736, 3i.A-359, 3i.A-239 and 3i.A-204 of Table 2 are positioned in an intron between exons 3 and 4 of the SNCG gene. These intron-region SNPs may affect splicing (see, e.g., Dredge et al. (2001) Nature Reviews 2:43-50; D'Souza et al. (1 999) PNAS, U.S.A. 96:5598-5603; Grover et al. (1999) J. Biol. Chem. 274:15134-15143), and the like.

[0906] Coding Sequence

[0907] The SNPs located at positions corresponding to 1e.5′UTR-19, 1e.CDS+9, 1e.CDS+37 are positioned in the first exon, where 1e.CDS+37 results in a change in amino acid residue 13 from E to K. The SNPs located at positions corresponding to 3e.CDS+195 and 3e.CDS+202 are positioned in the third exon of the coding region, where 3e.CDS+202 results a change in amino acid residue 68 from E to K. The SNP located at 4e.CDS+329 is in the fourth exon.

[0908] 3′UTR Sequence

[0909] The SNPs corresponding to 5e.3′UTR+80, 5e.3′UTR+99, 5e.3′UTR+123, 5e.3′UTR+129 and 5e.3′UTR+240 are located in the 3′ untranslated sequence and may affect, among other processes, stability, RNA processing, and polyadenylation of the SNCG transcript.

[0910] 3′Flanking Sequence

[0911] The SNP corresponding to ds+348 is located downstream from the SNCG gene, in a region that may contain cis-acting elements capable of modulating SNCG gene expression.

[0912] Other known SNPs in the SNCG gene contemplated for use in the various diagnostic and screening methods, as well as kits and solid supports, provided herein include the NCBI SNPs set forth in Table A, which are referenced by their respective locations in FIG. 1 and in SEQ ID NO: 72.

TABLE A
SNCG NCBI Polymorphisms

| | | POSITION IN |
|---|---|---|
| NCBI SNP ID NO. | POLYMORPHISM | SEQ ID NO:72 |
| rs1800714 | A/G | 560 |
| rs1802015 | A/T | 5112 |
| rs2131396 | G/T | 5421 |
| rs2131395 | A/G | 5648 |

### EXAMPLE 3

[0913] Sequencing of IDE, KNSL, TNFRSF6 and LIPA Candidate Genes

[0914] Genomic sequences were downloaded from the Human Genome Project public database. The exon-intron structure of each candidate gene was determined by querying the NCBI BLASTN search and alignment program with one or more cDNA sequences encoding the gene (Altschul et al. (1 997) Nucleic Acids Res. 25:3389-3402). Based on this information, primers were designed to amplify regions of interest from genomic DNA and sequence them on both strands. These regions consisted of: (1) approximately 1 kb of 5′ flanking sequence 5′ to the beginning of exon 1, containing the putative promoter; (2) all exons plus 50-200 bp 5′ and 3′ flanking sequence for each one; and (3) ˜700 bp 3′ to the translation stop codon. When the final exon contained a 3′UTR>700 nt long, the region>700 nt 3′ to the stop codon was not amplified.

[0915] The genomic DNA samples were obtained from NIMH as described in Example 1. The desired regions were amplified by PCR using 30 ng each genomic DNA with the HotStarTaq Master Mix Kit (QIAGEN, Inc., Valencia, Calif.) and a final concentration of 1 μm each of specific PCR primers (see Tables below) according to the manufacturer's protocol. The annealing temperature for different primers was varied as required. The reactions were purified using the QIAquick 96 PCR Purification Kit (QIAGEN, Inc., Valencia, Calif.) according to the manufacturer's protocol. PCR product yields were quantitated using the PicoGreen dsDNA Quantitation Kit (Molecular Probes, Inc., Eugene, Oreg.) according to the manufacturer's protocol. Sequencing reactions were performed with ABI PRISM BigDye™ Terminators v3.0 Cycle Sequencing Kit (Applied Biosystems, Foster City, Calif.), using a modification of the manufacturer's protocol as follows. For each template and primer combination (see Tables, below), a mixture of 2 μl BigDye Mix, 4 μl 5× Sequencing Buffer, 8 μl H₂O 2 μl primer (1.6 pmol/μl ), and 4 μl PCR product (3 ng/μl) was subjected to 30 cycles of 10 s at 96° C., 5 s at 50° C. and 4 min at 60° C. The reactions were purified on a Centri-Sep 96 plate (Princeton Separations, Adelphia, N.J.) according to the manufacturer's protocol and analyzed in an ABI 3700 Automated DNA Sequencer (Applied Biosystems, Foster City, Calif.). Sequence data for each region in all samples were aligned using Sequencher software (GeneCodes Corp., Ann Arbor) and manually evaluated for the presence of polymorphisms.

[0916] IDE

[0917] The nucleotide sequence of the IDE gene in two sets of human genomic DNA samples was determined. The “D10-Top10” set was derived from 10 members of three families with the highest scores for AD linkage to genetic marker D10S583. The “D10-E16” set was derived from sixteen genomic DNA samples from four families showing the highest combined LOD scores for linkage with LOAD at 6 markers (D10S564, D10S583, D10S1710, D10S566, D1OS1671 and D10S1741). Each set contained individuals both affected and unaffected with AD.

[0918] Twenty-five exons have been identified in the human IDE gene by comparison of cDNA clones containing the IDE coding sequence (CDS) with genomic sequence data. The cDNA corresponding to GenBank accession No. NM_{—}004969 (Affholter et al. (1988) Science 242:1415-1418) contains a 5′UTR having 57 nucleotides (nt) 5′ to the translation initiation codon, the complete 3060-nt coding sequence (CDS) and 162 nucleotides of 3′UTR. Genomic DNA sequence corresponding to GenBank accession No. AL356128.15 (corresponding to Chromosome 10 BAC clone RP11-366113) was used for primer design.

[0919] Based on this information, primers were designed to amplify and sequence exons 1 through 25 and at least approximately 50-200 bp 5′ and 3′ to the exon boundaries indicated by the above cDNA sequences. Approximately 1.4 kb of the presumed promoter-containing region 5′ to exon 1 was also amplified and sequenced. Approximately 400 bp 3′ to the second stop codon in exon 25 were amplified and sequenced (FIG. 2). The primers used for amplifying IDE genomic fragments corresponding to the 5′ regulatory region and the 25 exons and their corresponding sequencing primers are shown in Table 3.

TABLE 3

| | | | |
|---|---|---|---|
| NAME | SEQUENCE | SEQ ID NO | PURPOSE |

| | | | |
|---|---|---|---|
| IDE.Pro.p1 | CTCCATTCCGCTTACCCAA | 74 | PCR |
| IDE.Pro.p2 | AAGAGGTCCCCCAAATTGTA | 75 | PCR |
| IDE.pro.s1 | GAGGACTGAGCGGAAGGT | 76 | sequencing |
| IDE.pro.s2 | GGACTAAGGACACCGTTT | 77 | sequencing |
| IDE.pro.s3 | TGGCGACGTGTGTCTGAC | 78 | sequencing |
| IDE.pro.s4 | ACCACTGAAGCCGACTGA | 79 | sequencing |
| IDE.pro.s5 | GGCGAGGACGGTGAAGA | 80 | sequencing |
| IDE.pro.s6 | GTCCTCGCCTGCGTCCT | 81 | sequencing |
| IDE.pro.s7 | AGGCACCCCCACTGACT | 82 | sequencing |
| IDE.exon01.p1 | TGCAGGCCGGGTGACTCT | 83 | PCR |
| IDE.exon01.p2 | CGCCCCCTCACAGTCAGACA | 84 | PCR |
| IDE.exon01.s1 | CGGTGGCGGCTTTAAGT | 85 | sequencing |
| IDE.exon01.s2 | CGTCGCCACCCTCACAA | 86 | sequencing |
| IDE.exon02.p1 | TTGCTGCTAGGTCACCTTA | 87 | PCR |
| IDE.exon02.p2 | CTATCTCAAATCCCTATCCA | 88 | PCR |
| IDE.exon02.s1 | CTTTACGAGGGTTCTGGTA | 89 | sequencing |
| IDE.exon02.s2 | GGAGGAAAGGAATGACTG | 90 | sequencing |
| IDE.exon03.p1 | AGTCCTCATCACATGCTTTATA | 91 | PCR |
| IDE.exon03.p2 | GGGAAACTAATGTTCAGAGA | 92 | PCR |
| IDE.exon03.s1 | ATGGAAAGGGCTGCTGAA | 93 | sequencing |
| IDE.exon03.s2 | CAAGAGCAGGCACTAGAA | 94 | sequencing |
| IDE.exon04.p1 | TAACTGCTCTGCTCCTTAAACG | 95 | PCR |
| IDE.exon04.p2 | TCATCTCTGGGGTAGATCAAC | 96 | PCR |
| IDE.exon04.s1 | CTGAATTGTAAAATATGCCA | 97 | sequencing |
| IDE.exon04.s2 | GCATTTACCTCTGTTCAAC | 98 | sequencing |
| IDE.exon05.p1 | AATCCCCACCTATGTATTCT | 99 | PCR |
| IDE.exon05.p2 | AAAGACACTTTTAATTCCGTAG | 100 | PCR |
| IDE.exon05.s1 | TCCCCACCTATGTATTCTC | 101 | sequencing |
| IDE.exon05.s2 | TTAAAATGTTGCTGGTTTG | 102 | sequencing |
| IDE.exon06.p1 | AGGTGGGAGGATCAATTCA3′ | 103 | PCR |
| IDE.exon06.p2 | GAAGGCAATTCTCTGTCTATGT | 104 | PCR |
| IDE.exon06.s1 | CACAACATAAATAATGAAACC | 105 | sequencing |
| IDE.exon06.s2 | TTTTCACATTTTCCTTTCAG | 106 | sequencing |
| IDE.exon07.p1 | CGAAACCCCATCTCTATCT | 107 | PCR |
| IDE.exon07.p2 | ATCATTTTCTGTGGCAATTGA | 108 | PCR |
| IDE.exon07.s1 | GTGCCAACAACCACCATC | 109 | sequencing |
| IDE.exon07.s2 | GGATTCTCCCATGAAAATC | 110 | sequencing |
| IDE.exon08.p1 | ACACTTAAAAACCATTCAGTCC | 111 | PCR |
| IDE.exon08.p2 | GCCCAGCCAGTAGTCTACTC | 112 | PCR |
| IDE.exon08.s1 | GGGGGAAGAATCATCCAT | 113 | sequencing |
| IDE.exon08.s2 | CCCACTTCTGCACCATC | 114 | sequencing |
| IDE.exon09.p1 | GCCTCTTCCCATACATACAAT | 115 | PCR |
| IDE.exon09.p2 | AACACCCTTTCTGTCACATATC | 116 | PCR |
| IDE.exon09.s1 | GCCCCAAGTAGCAAATCA | 117 | sequencing |
| IDE.exon09.s2 | CCATCTTCCACTTATCTGA | 118 | sequencing |
| IDE.exon10.p1 | ATCGCAGGTAAAAGACTATC | 119 | PCR |
| IDE.exon10.p2 | AGTTTCAACAACTTAGGCTATC | 120 | PCR |
| IDE.exon10.s1 | GCCCTGTTGCTACAAAGT | 121 | sequencing |
| IDE.exon10.s2 | TTCTAAATCAAGCATAGCC | 122 | sequencing |
| IDE.exon11.p1 | AAGAGGGATGGGTATAGATTA | 123 | PCR |
| IDE.exon11.p2 | TTTTAACCAGAAACATTCGTG | 124 | PCR |
| IDE.exon11.s1 | TGGTGTTGCTTCATTATAC | 125 | sequencing |
| IDE.exon11.s2 | GGTAGGAAAGAGACAACGA | 126 | sequencing |
| IDE.exon12.p1 | TATGGCATGAGGCACAACC | 127 | PCR |
| IDE.exon12.p2 | GAATCTCTCCTGCGAGCACT | 128 | PCR |
| IDE.exon12.s1 | GCTCCCTATCTACTTGTTGA | 129 | sequencing |
| IDE.exon12.s2 | AACTAAAGGATAACAGGGAC | 130 | sequencing |
| IDE.exon13.p1 | CAAAGAAAGTGATTCCCTA | 131 | PCR |
| IDE.exon13.p2 | TGATCTGCATATGGACCAGT | 132 | PCR |
| IDE.exon13.s1 | TGTGAGCCTCCCCAAATC | 133 | sequencing |
| IDE.exon13.s2 | ATGGAAAACAATGCTGTG | 134 | sequencing |
| IDE.exon14.p1 | TTAGCCAGGATGGTCTCAC | 135 | PCR |
| IDE.exon14.p2 | CCTAGTGTCCAGAAAGACGA | 136 | PCR |
| IDE.exon14.s1 | GCCTCTCCTTTTCTAGGTG | 137 | sequencing |
| IDE.exon14.s2 | CAGCAACTCCAGAACAAA | 138 | sequencing |
| IDE.exon15.p1 | AACCTAAATCAGGGTCCAAT | 139 | PCR |
| IDE.exon15.p2 | TCTTCACTACTACCAGTGCG | 140 | PCR |
| IDE.exon15.s1 | ATGAGAAAATATGATTAGCC | 141 | sequencing |
| IDE.exon15.s2 | AGCCTCAAGAATTCAACC | 142 | sequencing |
| IDE.exon16.p1 | AGGTGTCCACCAGAGTCTACTA | 143 | PCR |
| IDE.exon16.p2 | TGAGGTTGCAGTGAACTGAA | 144 | PCR |
| IDE.exon16.s1 | AATGCCACAGGGTTATGA | 145 | sequencing |
| IDE.exon16.s2 | TTACATGTCTGTTTTGGGAT | 146 | sequencing |
| IDE.exon17.p1 | TATCATTTGTTTGGGTTGGG | 147 | PCR |
| IDE.exon17.p2 | GGGGATGGCTTTATAGCGT | 148 | PCR |
| IDE.exon17.s1 | ACAGCCAGCTTTAATAGA | 149 | sequencing |
| IDE.exon17.s2 | CAGAAAGGGGAAAGAAGG | 150 | sequencing |
| IDE.exon18.p1 | TTGAATCCAGGCTGTCTAAT | 151 | PCR |
| IDE.exon18.p2 | AATGGGAAAAATCCAAATA | 152 | PCR |
| IDE.exon18.s1 | TCCACAGAGCAAGAGGGT | 153 | sequencing |
| IDE.exon18.s2 | GGGAAAACTAGGTGAAGTG | 154 | sequencing |
| IDE.exon19.p1 | TCAAGTACCCGTCAATTC | 155 | PCR |
| IDE.exon19.p2 | TTTTCCAGCATCAGCATCAG | 156 | PCR |
| IDE.exon19.s1 | GAGAGGTTCCCAAGTAAA | 157 | sequencing |
| IDE.exon19.s2 | TTTCTTTCACCACTACCATA | 158 | sequencing |
| IDE.exon20.p1 | GGCTTGGGATATAAAGACGA | 159 | PCR |
| IDE.exon20.p2 | TGATGAGAGGGAACTTAGTGCT | 160 | PCR |
| IDE.exon20.s1 | AAGGTTTTCTCAAGTCTCTC | 161 | sequencing |
| IDE.exon20.s2 | AACTCCAGGCTTCTCTAC | 162 | sequencing |
| IDE.exon21.p1 | GGGTAGATCCAGGTCTAGGT | 163 | PCR |
| IDE.exon21.p2 | TGACAAGATGGGAGTTTGAA | 164 | PCR |
| IDE.exon21.s1 | ACCCCAACTCCCCAAATA | 165 | sequencing |
| IDE.exon21.s2 | TTTATTTGCTCAGACAGGTT | 166 | sequencing |
| IDE.exon22.p1 | AAAGTCATTAAGCGTTTGTG | 167 | PCR |
| IDE.exon22.p2 | TATAAAAATTACCCAGACGTGT | 168 | PCR |
| IDE.exon22.s1 | CTGACCTCAAGTGATCCTT | 169 | sequencing |
| IDE.exon22.s2 | CCACTGCACTCCAGCGT | 170 | sequencing |
| IDE.exon23.p1 | TGTGATGCTGTGGCTAGCTC | 171 | PCR |
| IDE.exon23.p2 | CAAACTTGCTTCCTCGTGT | 172 | PCR |
| IDE.exon23.s1 | TTATCTCCAGTTTCCGTTC | 173 | sequencing |
| IDE.exon23.s2 | GGGAAGCATCTTTTCTATA | 174 | sequencing |
| IDE.exon24.p1 | TTTTAGTTCCCAATGAACAAGT | 175 | PCR |
| IDE.exon24.p2 | GGTAGCAGGCAACCTTTAG | 176 | PCR |
| IDE.exon24.s1 | CCCAAGAAGTGGAGGTTGTA | 177 | sequencing |
| IDE.exon24.s2 | CAGGCAACCTTTAGAGGAT | 178 | sequencing |
| IDE.exon25.p1 | TAAAAAGATTAAAACCATGCC | 179 | PCR |
| IDE.exon25.p2 | GTACAGACCAATTCACGACCC | 180 | PCR |
| IDE.exon25.s1 | ATGTAATGTTTTCCACTGAT | 181 | sequencing |
| IDE.exon25.s2 | CAGAAGAAAGGTCAGCAGA | 182 | sequencing |
| IDE.exon25.s3 | CATTCATTTTAAGCATTGT | 183 | sequencing |
| IDE.exon25.s4 | GTATGCTCCCAGTGTCCG | 184 | sequencing |
| IDE.exon25.s6 | CAAAACTCTGAAGATTCCC | 185 | sequencing |

[0920] Polymorphic regions (such as SNPs, and the like) were discovered by comparing the sequenced samples to reference IDE genomic sequences (SEQ ID NO: 186 and the reverse complement of nucleotides 1-130,000 of SEQ ID NO: 484) and identifying nucleotides that varied from the reference nucleotide sequence at specific positions (see Tables 4 and 4-B). SEQ ID NO: 186 represents the reverse complement of a 128,034 nucleotide sequence corresponding to NCBI Accession #AL356128.15. Table 4 shows the polymorphic regions that were identified, including previously identified polymorphic regions (set forth as a yes in the public database column), and the type of nucleotide polymorphic change detected relative to the IDE reference genomic sequence set forth as SEQ ID NO: 186.

TABLE 4
(IDE Polymorphic Regions)

| | | COM- | | |
|---|---|---|---|---|
| | | PLEMENT | | |
| | | STRAND | | NUCLEO- |
| | POSITION | POSITION | PUBLIC | TIDE |
| POLY- | IN SEQ | IN SEQ | DATA- | CHANGE |
| MORPHISM | ID NO:186 | ID NO:484 | BASE? | DETECTED |
| US-945 | 2456 | 121239 | NO | T→G |
| US-122 | 3279 | 120416 | NO | T→C |
| 1.e5′UTR − 51 | 3407 | 120288 | NO | C→T |
| 3i.D + 42 | 42943 | 80752 | NO | T→C |
| 4i.A − 7 | 62498 | 61270 | NO | T→C |
| 8i.D + 149 | 69586 | 54182 | NO | T→C |
| 18i.D + 98 | 107395 | 16373 | NO | G→A |
| 20i.D + 249 | 112114 | 11654 | NO | G→A |
| 22i.D + 302 | 116662 | 7106 | YES | T→A |

[0921] Upstream Sequence

[0922] Two polymorphic regions (i.e., SNPs) were discovered upstream of the transcription start site of the IDE gene, US-945 and US-1 22, which are located 945 and 1 22 nucleotides, respectively, before exon 1 of the IDE gene (positions 2456 and 3279 of SEQ ID NO: 186). These SNPS are located in putative promoter or enhancer regions of the IDE gene and as such a nucleotide change may affect the expression of the IDE gene, e.g., level, response to stimulatory or inhibitory molecules, and the like.

[0923] 5′UTR Sequence

[0924] The polymorphic region corresponding to the SNP labeled 1.e5′UTR-51 is located 51 nucleotides upstream of the translation start codon in the IDE cDNA. This site may affect the level of expression of the IDE transcript.

[0925] Intervening Sequences

[0926] The polymorphic regions corresponding to SNPs labeled as 3i.D+42, 4i.A-7, 8i.D+149, 18i.D+98, 20i.D+249, and 22i.D+302 1iD+41 are contained in introns. For example, 3i.D+42 is located 42 nucleotides after exon 3, 4i.A-7 is located 7 nucleotides before exon 5, 8i.D+149 is located 149 nucleotides after exon 8, 18i.D+98 is located 98 nucleotides after exon 18, 20i.D+249, is located 249 nucleotides after exon 20 and 22i.D+302 is located 302 nucleotides after exon 22. These SNPS may affect splicing of the IDE RNA transcript, or the like.

[0927] Table 4-B shows additional IDE polymorphic regions that were identified, including previously identifed polymorphic regions (set forth as a yes in the public database column), and the type of nucleotide polymorphic change detected relative to the IDE reference genomic sequence that corresponds to the reverse complement of nucleotides 1 through approximately 130,000 set forth in SEQ ID NO: 484. Thus, the strand set forth in SEQ ID NO: 484 contains the complementary nucleotides to the actual polymorphic nucleotide regions on the coding strand set forth in Table 4-B. For example, the polymorphism located in Table 4-B at position 21270 corresponding to T-G (e.g., T/G) is referred to in SEQ ID NO: 484 as either A or C.

TABLE 4-B

| | COMPLEMENT | | |
|---|---|---|---|
| | STRAND | | NUCLEOTIDE |
| POLYMORPHISM | POSITION IN | PUBLIC | CHANGE |
| NAME | SEQ ID NO:484 | DATABASE? | DETECTED |
| IDE_25i.1 | 820 | NO | A→T |
| IDE_23i.2 | 7066 | NO | A→G |
| IDE_21i.1 | 11758 | YES | T→C |
| IDE_17i.1 | 21270 | NO | T→G |
| IDE_16i.1 | 22225 | NO | A→T |
| IDE_15i.1 | 29294 | NO | C→T |
| IDE_13e.1 | 33452 | NO | T→G |
| IDE_12i.1 | 33708 | NO | G→A |
| IDE_11i.1 | 36982 | NO | C→T |
| IDE_7i.1 | 54862 | YES | A→G |
| IDE_4i.1 | 77786 | NO | C→A |
| IDE_3i.2 | 80594 | NO | G→A |
| IDE_1i.D + 35348 | 84792 | YES | C→T |
| IDE_1i.D + 35143 | 84997 | NO | T→G |
| IDE_1i.D + 33458 | 86682 | NO | C→T |
| IDE_1i.D + 33283 | 86857 | NO | T→A |
| IDE_1i.D + 31631 | 88511 | NO | A→G |
| IDE_1i.D + 29704 | 90437 | NO | G→T |
| IDE_1i.D + 29548 | 90593 | NO | G→A |
| IDE_1i.D + 28490 | 91650 | NO | T→C |
| IDE_1i.D + 28270 | 91870 | NO | A→G |
| IDE_1i.D + 28262 | 91878 | NO | G→A |
| IDE_1i.D + 28129 | 92011 | NO | C→T |
| IDE_1i.D + 26522 | 93618 | NO | T→C |
| IDE_1i.D + 25796 | 94344 | NO | T→C |
| IDE_1i.D + 25426 | 94714 | NO | A→G |
| IDE_1i.D + 24469 | 95671 | NO | T→G |
| IDE_1i.D + 23816 | 96324 | NO | G→A |
| IDE_1i.D + 22838 | 97302 | NO | G→A |
| IDE_1i.D + 22770 | 97370 | NO | G→A |
| IDE_1i.D + 21887 | 98253 | NO | T→C |
| IDE_1i.D + 21864 | 98276 | YES | C→T |
| IDE_1i.D + 21755 | 98385 | NO | A→G |
| IDE_1i.D + 21494 | 98646 | NO | A→T |
| IDE_1i.D + 21326 | 98814 | NO | G→A |
| IDE_1i.D + 20543 | 99597 | NO | T→C |
| IDE_1i.D + 19762 | 100378 | NO | T→C |
| IDE_1i.D + 19111 | 101029 | NO | A→G |
| IDE_1i.D + 18875 | 101265 | NO | T→C |
| IDE_1i.D + 17675 | 102465 | NO | C→G |
| IDE_1i.D + 16851 | 103289 | NO | G→T |
| IDE_1i.D + 16173 | 103967 | NO | C→T |
| IDE_1i.D + 14347 | 105793 | NO | A→G |
| IDE_1i.D + 14064 | 106076 | NO | G→T |
| IDE_1i.D + 13687 | 106453 | YES | C→T |
| IDE_1i.D + 13540 | 106600 | YES | A→G |
| IDE_1i.D + 13145 | 106995 | NO | G→A |
| IDE_1i.D + 12289 | 107851 | NO | C→T |
| IDE_1i.D + 11706 | 108434 | NO | G→C |
| IDE_1i.D + 11044 | 109096 | NO | C→T |
| IDE_1i.D + 10741 | 109399 | NO | C→T |
| IDE_1i.D + 10657 | 109483 | NO | G→T |
| IDE_1i.D + 9270 | 110870 | NO | G→A |
| IDE_1i.D + 8951 | 111189 | NO | A→G |
| IDE_1i.D + 8168 | 111972 | NO | G→A |
| IDE_1i.D + 7513 | 112627 | NO | A→T |
| IDE_1i.D + 7511 | 112629 | YES | A→T |
| IDE_1i.D + 7509 | 112631 | YES | A→T |
| IDE_1i.D + 6733 | 113407 | NO | G→C |
| IDE_1i.D + 5696 | 114444 | YES | C→G |
| IDE_1i.D + 5658 | 114482 | NO | G→C |
| IDE_1i.D + 4667 | 115473 | NO | Deletion of C |
| IDE_1i.D + 3459 | 116681 | NO | T→G |
| IDE_1i.D + 2914 | 117226 | NO | A→T |
| IDE_1i.D + 2540 | 117600 | NO | A→G |
| IDE_1i.D + 2338 | 117802 | YES | C→T |
| IDE_1i.D + 1917 | 118223 | NO | C→G |
| IDE_1i.1 | 120011 | NO | C→T |
| IDE_us-1966 | 122260 | NO | T→C |
| IDE_us-2871 | 123165 | NO | T→C |
| IDE_us-3130 | 123424 | NO | C→T |
| IDE_us-4058 | 124352 | NO | T→C |
| IDE_us-4207 | 124501 | NO | G→A |
| IDE_us-4398 | 124692 | NO | T→C |
| IDE_us-4819 | 125113 | NO | A→T |
| IDE_us-4865 | 125159 | NO | C→T |
| IDE_us-6274 | 126568 | NO | C→G |
| IDE_us-6872 | 127166 | NO | G→C |
| IDE_us-7304 | 127598 | NO | A→G |
| IDE_us-7306 | 127600 | NO | A→G |
| IDE_us-7315 | 127609 | NO | A→G |
| IDE_us-7320 | 127614 | NO | A→G |
| IDE_us-7329 | 127623 | NO | A→G |
| IDE_us-7368 | 127662 | NO | T→C |
| IDE_us-7759 | 128053 | NO | G→A |
| IDE_us-7970 | 128261 | NO | -TAAA- |
| | | | Repeated 6, |
| | | | 7 or 8 times |
| IDE_us-7995 | 128289 | NO | T→A |
| IDE_us-7997 | 128291 | NO | A→C |
| IDE_us-8099 | 128393 | NO | A→C |
| IDE_us-9150 | 129444 | NO | A→G |

[0928] Other known SNPs in the IDE gene contemplated for use in the various diagnostic and screening methods, as well as kits and solid supports, provided herein include the NCBI SNPs set forth in Table B and Table B-2, which are referenced by their respective locations in FIG. 2 and SEQ ID NO: 186; and in FIG. 6 and SEQ ID NO: 484, respectively.

TABLE B
IDE NCBI Polymorphisms

| NCBI | | POSITION IN |
|---|---|---|
| SNP ID No. | POLYMORPHISM | SEQ ID NO:186 |
| rs1999764 | A/G | 17095 |
| rs1999763 | C/T | 17242 |
| rs1970243 | C/G | 33590 |
| rs1832197 | C/T | 38903 |
| rs1855915 | A/G | 43391 |
| rs868057 | A/T | 45017 |
| rs1832195 | A/G | 68906 |
| rs1832196 | C/T | 68973 |
| rs1970245 | C/G | 73772 |
| rs1970244 | C/T | 74084 |
| rs1855916 | C/T | 83024 |
| rs1855917 | C/T | 83104 |
| rs2149632 | A/G | 105060 |
| rs544537 | A/T | 108489 |
| rs538469 | A/G | 111914 |
| rs1887922 | A/G | 113142 |
| rs1042444 | A/G | 113591 |
| rs551266 | A/G | 114683 |
| rs489517 | G/T | 117803 |
| rs568657 | A/G | 89301 |
| rs913648 | C/T | 124565 |

[0929] TABLE B-2
IDE NCBI Polymorphisms

| | | COMPLEMENT |
|---|---|---|
| NCBI | | STRAND POSITION |
| SNP ID NO. | POLYMORPHISM | IN SEQ ID NO:484 |
| rs568657 | A/G | 4864 |
| rs489517 | G/T | 5965 |
| rs2247348 | C/T | 6078 |
| rs520711 | A/T | 7106 |
| rs551266 | A/G | 9085 |
| rs1042444 | A/G | 10177 |
| rs1887922 | A/G | 10626 |
| rs2275218 | T/C | 11758 |
| rs538469 | A/G | 11854 |
| rs544537 | A/T | 15279 |
| rs2250090 | G/A | 18267 |
| rs2149632 | A/G | 18708 |
| rs2249960 | A/G | 19581 |
| rs2421940 | A/G | 30078 |
| rs1855917 | C/T | 40664 |
| rs1855916 | C/T | 40744 |
| rs1970244 | C/T | 49684 |
| rs1970245 | C/G | 49996 |
| rs1832196 | C/T | 54795 |
| rs1832195 | A/G | 54862 |
| rs2421942 | C/G | 73841 |
| rs868057 | A/T | 78678 |
| rs1855915 | A/G | 80304 |
| rs2275221 | C/T | 83448 |
| rs1855915 | C/T | 80304 |
| rs1970243 | C/G | 90105 |
| rs2421943 | A/G | 98276 |
| rs1999763 | C/T | 106453 |
| rs1999764 | A/G | 106600 |
| rs2421945 | A/G | 117802 |
| rs2901597 | A/G | 129124 |

[0930] Amplification and Genotyping IDE Haplotype Polymor phisms:

[0931] As set forth herein, an exemplary haplotype useful in the methods provided herein for determining a predisposition or occurrence of neurodegenerative disease, such as Alzheimer's disease, comprises multiple polymorphic regions of the IDE gene corresponding to nucleotides 2456, 3279, 3407 and 42943 of SEQ ID NO: 187. In one embodiment, the nucleotide in IDE at position 2456 of SEQ ID NO: 187 is G, at position 3279 of SEQ ID NO: 187 is T, at position 3407 of SEQ ID NO: 187 is T, and at position 42943 of SEQ ID NO: 187 is T. In another embodiment, the nucleotide in IDE at position 2456 of SEQ ID NO: 187 is T, at position 3279 of SEQ ID NO: 187 is T, at position 3407 of SEQ ID NO: 187 is C, and at position 42943 of SEQ ID NO: 187 is T. In still a further embodiment, the nucleotide in IDE at position 2456 of SEQ ID NO: 187 is T, at position 3279 of SEQ ID NO: 187 is T, at position 3407 of SEQ ID NO: 187 is C, and at position 42943 of SEQ ID NO: 187 is C. In yet another embodiment, the nucleotide in IDE at position 2456 of SEQ ID NO: 187 is T, at position 3279 of SEQ ID NO: 187 is C, at position 3407 of SEQ ID NO: 187 is C, and at position 42943 of SEQ ID NO: 187 is C.

[0932] The polymorphic regions of the IDE gene corresponding to nucleotides 2456, 3279, 3407 and 42943 of SEQ ID NO: 187 can be genotyped using well known methods and the PCR amplification and FP-SBE primers and conditions set forth in FIG. 7. For example, all genotypes were generated either using fluorescent polarization detected single base extension (FP-SBE, “Criterion Analyst AD”, Molecular Devices, Inc.); single base extension using capillary electrophoresis (using the “SNuPe” software on a “MegaBACE-1000” genotyping/sequencing system, Amersham-Pharmacia); or by capillary electrophoresis of PCR products using fluorescently labeled primers (using the “Genetic Profiler” software on the “MegaBACE 1000”). Generally, PCR primers were designed to yield products between 200-400 bp in length and added to ˜10 ng of genomic DNA using individually optimized PCR conditions. PCR primers and unincorporated dNTPs were degraded by the direct addition of exonuclease I (0.1-0.15 U/rxn) and shrimp alkaline phosphatase (1U/rxn). The single base extension step was carried out using Thermosequenase (0.4 U/rxn) and the appropriate mix of R110-ddNTP, TAMRA-ddNTP (3 mM), and all four unlabeled ddNTPs (22 or 25 μM) to the Exol/SAP treated PCR product. To assess genotyping quality, 10% of the samples were randomly duplicated and called twice. Primer sequences, PCR and SBE cycling conditions are set forth in FIG. 7.

[0933] KNSL1

[0934] The nucleotide sequence of the KNSL1 gene in two sets of human genomic DNA samples was determined. The “D10-Top10” set was derived from 10 members of three families with the highest scores for AD linkage to genetic marker D10S583. The “D10-E16” set was derived from sixteen genomic DNA samples from four families showing the highest combined LOD scores for linkage with LOAD at 6 markers (D10S564, D10S583, D10S1710, D10S566, D10S1671 and D10S1741). Each set contained individuals both affected and unaffected with AD.

[0935] Twenty-one exons have been identified in the human KNSL1 gene by comparison of cDNA clones containing the KNSL1 coding sequence (CDS) with genomic sequence data. Exon-intron structure was determined, as previously described, from cDNA sequences from GenBank Accession numbers XM_{—}005889, XM_{—}051151 and XM_{—}051152. For example, the cDNA corresponding to GenBank accession No. XM_{—}005889 contains a 5′UTR having 142 nucleotides (nt) 5′ to the translation initiation codon, the complete 3171-nucleotide coding sequence (CDS) and 1597 nucleotides of 3′UTR. Genomic DNA sequence corresponding to GenBank accession No. NT_{—}008769.1 was used for primer design.

[0936] Based on this information, primers were designed to amplify and sequence exons 1 through 21 and at least approximately 50-200 bp 5′ and 3′ to the exon boundaries indicated by the above cDNA sequences. Approximately 0.9 kb of the presumed promoter-containing region 5′ to exon 1 was also amplified and sequenced. Approximately 0.7 kb 3′ to the stop codon in exon 21 were amplified and sequenced. The primers used for amplifying KNSL1 genomic fragments corresponding to the 5′ regulatory region and the 21 exons and their corresponding sequencing primers are shown in Table 5.

TABLE 5

(Primers for KNSL1 Genomic PCR and Sequencing)

| | | | |
|---|---|---|---|
| NAME | SEQUENCE | SEQ ID NO: | PURPOSE |

| | | | |
|---|---|---|---|
| KNSL.Pm-p01 | ATGGTGAAACCACATCTCTACTG | 188 | PCR |
| KNSL.Pm-p02 | CCAGAAACTAAGCAACGACTC | 189 | PCR |
| KNSL.Pm-3s | ATGGTGAAACCACATCTCTACTG | 190 | sequencing |
| KNSL.Pm-4s | CCAGAAACTAAGCAACGACTC | 191 | sequencing |
| KNSL.Pm-5s | CAAGACTCCGTCTCTCACACAC | 192 | sequencing |
| KNSL.Pm-6s | GCCGAGACGCTAGAATTGAGTG | 193 | sequencing |
| KNSL.1-p01 | CGGGGCTCCAGTGAGGATAC | 194 | PCR |
| KNSL.1-p02 | ACACAGCAACCGGGTGTCAT | 195 | PCR |
| KNSL.01-3s | TTGGTCCGGCTACTCTGTCT | 196 | sequencing |
| KNSL.01-4s | TGAACAGAACGCGGAGAACC | 197 | sequencing |
| KNSL.01-5s | AAGCCCCTCCGCCCCTCACA | 198 | sequencing |
| KNSL.01-6s | GCTGCGACGCCATGACGGTC | 199 | sequencing |
| KNSL.2-p01 | AAGCTGCCAGAATTGTAATG | 200 | PCR |
| KNSL.2-p02 | GGACAAACAACACTTCGGTA | 201 | PCR |
| KNSL.02-3s | TTTCGCATTTTTCTTGACAA | 202 | sequencing |
| KNSL.02-4s | ATTCATAATTCAGCCCACTA | 203 | sequencing |
| KNSL.02-4sb | GCCCACTAGAAGCCATCTGA | 204 | sequencing |
| KNSL.02-6s | ATTCAGAGACAACTGAAATT | 205 | sequencing |
| KNSL.3-p01 | TTGTCAGATGGCTTCTAGTG | 206 | PCR |
| KNSL.3-p02 | CATGCACCCATATGACTCTT | 207 | PCR |
| KNSL.03-3s | GCTTCTAGTGGGCTGAATTA | 208 | sequencing |
| KNSL.03-3sb | TGGCTTCTAGTGGGCTGAAT | 209 | sequencing |
| KNSL.03-3sc | TAGTGGGCTGAATTATGAAT | 210 | sequencing |
| KNSL.03-4s | TAAAAATACAAAAATTAGCG | 211 | sequencing |
| KNSL.03-5s | TTATGGGCTATAATTGCACT | 212 | sequencing |
| KNSL.03-6s | CGGGCATGGTGGCAGGCAGC | 213 | sequencing |
| KNSL.03-8s | TAGTGCAATTATAGCCCATA | 214 | sequencing |
| KNSL.4-p01 | AGTGTTGGGATTATAGGCTT | 215 | PCR |
| KNSL.4-p02 | TGGCCATGCTAACTTTC | 216 | PCR |
| KNSL.04-3s | GTTTTTTGTTTTTCTAGTCT | 217 | sequencing |
| KNSL.04-4s | TTCAATACAAAGCCCTCCCT | 218 | sequencing |
| KNSL.04-5s | TTTGAGGGCCTCTGTCTTGG | 219 | sequencing |
| KNSL.04-6s | GAGGCCCTCAAACAAGTTTT | 220 | sequencing |
| KNSL.5-p01 | GGGATGAAGATGGCTAAGAA | 221 | PCR |
| KNSL.5-p02 | TGACCCCTCCTTATAACA | 222 | PCR |
| KNSL.05-3s | TTGCTTTGCCATACTTATGT | 223 | sequencing |
| KNSL.05-4s | ACCCCTCCTTATAACACAAA | 224 | sequencing |
| KNSL.05-4sb | ATACCCTGACCCACCCCAAT | 225 | sequencing |
| KNSL.05-5s | ATGATCCCCGTAACAAGGTA | 226 | sequencing |
| KNSL.05-5sb | GCTTTGAGAAGTCAGAGAGA | 227 | sequencing |
| KNSL.05-6s | TTTTGCTGCCCCCTTTTCTA | 228 | sequencing |
| KNSL.05-7s | ATTTTAGAAAAGGGGGCAGC | 229 | sequencing |
| KNSL.05-8s | CGGGGATCATCAAACATCTG | 230 | sequencing |
| KNSL.6-p01 | TTGACATACCAGGCAACTGT | 231 | PCR |
| KNSL.6.p02 | GCCCACCTTGGACTTC | 232 | PCR |
| KNSL.06-3s | GTTTCGACCCCACCCACATC | 233 | sequencing |
| KNSL.06-4s | ATCCGCCCACCTTGGACTTC | 234 | sequencing |
| KNSL.06-4sb | CTGGGTTTACAGGTGTGAGT | 235 | sequencing |
| KNSL.06-5s | TAATGACTGGGCAACTTGAT | 236 | sequencing |
| KNSL.06-6s | CTACAAGGGCAGTAATGACC | 237 | sequencing |
| KNSL.06-7s | TGCTGGCGATTTAATACATT | 238 | sequencing |
| KNSL.06-8s | TTTCCGATTTTAACAAGCTC | 239 | sequencing |
| KNSL.7-p01 | ATTATCCTAAGGGTCGAGAC | 240 | PCR |
| KNSL.7-p02 | TGGATGTTATGGCATGTAAA | 241 | PCR |
| KNSL.07-3s | AAAGGTTGGGCATAGTGGTC | 242 | sequencing |
| KNSL.07-4s | ATGGCATGTAAATTATACCT | 243 | sequencing |
| KNSL.07-5s | TGAGTACATTGGAATATGCT | 244 | sequencing |
| KNSL.07-6s | CCTTCCATGGGCAATTTAAC | 245 | sequencing |
| KNSL.8-p01 | ACAAGATGTTCCGTATTCAT | 246 | PCR |
| KNSL.8-p02 | GGTGACAGTGCGAGACCT | 247 | PCR |
| KNSL.08-3s | GTGGTTTTTCTTGGGAAGTC | 248 | sequencing |
| KNSL.08-4s | TCGGCACTGGATATAAAGAT | 249 | sequencing |
| KNSL.08-5s | TGTCCTTCCCAAACTGAATG | 250 | sequencing |
| KNSL.9-p01 | CCGTCCTCTGTTAGCTTTC | 251 | PCR |
| KNSL.9-p02 | CTCTTGCCTACCCTAGTTAT | 252 | PCR |
| KNSL.09-3s | CACACATGCTTTTCCCCTCA | 253 | sequencing |
| KNSL.09-4s | CCCAATATCTGTATTCCTTC | 254 | sequencing |
| KNSL.09-5s | AATGTTGGAAATGAGTTTGT | 255 | sequencing |
| KNSL.09-6s | GCTGAGATGGGCAGATCATG | 256 | sequencing |
| KNSL.09-6sb | GAAGGAAAAAATATTAGATC | 257 | sequencing |
| KNSL.09-7s | ATTTTTTCCTTCAAGATTTT | 258 | sequencing |
| KNSL.09-8s | CTTACCCTATTCAGCTCCTC | 259 | sequencing |
| KNSL.10-p01 | CCAGGCCACATTAACAC | 260 | PCR |
| KNSL.10-p02 | CCAGGAGCAGGAGTAGTTTT | 261 | PCR |
| KNSL.10-3s | GTTAACCTACCGGGTAACTT | 262 | sequencing |
| KNSL.10-4s | GCTGGCAGCATCATGAAGTT | 263 | sequencing |
| KNSL.10-4sb | AGTGAGAAAAACATGGATGA | 264 | sequencing |
| KNSL.10-5s | TGTAAATCTGACCTGCAAAA | 265 | sequencing |
| KNSL.10-6s | AAGAAGTTACCCGGTAGGTT | 266 | sequencing |
| KNSL.11-p01 | GTGGCAGTGGCACAATCTGT | 267 | PCR |
| KNSL.11-p02 | GCCCAAGAAATTTAACAAT | 268 | PCR |
| KNSL.11-3s | TGGCCAGGCTGGAAAATTTA | 269 | sequencing |
| KNSL.11-4s | AGGGTCAGGAGCCGGAGTCA | 270 | sequencing |
| KNSL.11-4sb | TTGTGCATGGTAGAGAGTAT | 271 | sequencing |
| KNSL.11-5s | AGGCCATGCTAGAAGTACAT | 272 | sequencing |
| KNSL.11-6s | GGCCTTTTGCTTTGAGCTGC | 273 | sequencing |
| KNSL.12-p01 | CACTAAGCCAAGCACTATAC | 274 | PCR |
| KNSL.12-p02 | CTGCACTCCTGGACGA | 275 | PCR |
| KNSL.12-3s | AATATGTTAAGGGCTTACAG | 276 | sequencing |
| KNSL.12-4s | TGTAGTCTCTCACAGTGACG | 277 | sequencing |
| KNSL.12-5s | AGCACTTGGATCTCTCACAT | 278 | sequencing |
| KNSL.12-6s | GTAGACACATTTTCTGGAAT | 279 | sequencing |
| KNSL.13-p01 | ATGTTGCCACTGTACTCCAA | 280 | PCR |
| KNSL.13-p02 | TATCCATGCCATCCTAGAA | 281 | PCR |
| KNSL.13-3s | ATGTTGCCACTGTACTCCAA | 282 | sequencing |
| KNSL.13-3sb | AAAGAATGGAGAATGGAAAT | 283 | sequencing |
| KNSL.13-3sc | TGTGAATGTTTAGCTACCAA | 284 | sequencing |
| KNSL.13-4s | TCTGCATGGGGTTCTAGATG | 285 | sequencing |
| KNSL.13-5s | TATCCCCAACTGTGGTGTCT | 286 | sequencing |
| KNSL.13-6s | CCCAAGTCCGCTAAACAACA | 287 | PCR |
| KNSL.13-7s | AAGAAAATACCATTTGTTCC | 288 | PCR |
| KNSL.13-8s | CGGCCACTGTCAATGAAGTC | 289 | sequencing |
| KNSL.14-p01 | CATAGCGAGATCACGTCTCT | 290 | sequencing |
| KNSL.14-p02 | GCCAAACCCTGCTCTAGTT | 291 | sequencing |
| KNSL.14-3s | AGCCCAGGAGGTTGAAGCTG | 292 | sequencing |
| KNSL.14-3sb | TTCTCACCTATGGACAATAC | 293 | sequencing |
| KNSL.14-4s | AGAGCACAAATACGCAATGA | 294 | sequencing |
| KNSL.14-4sb | TACACAGAGGAATTATTTGT | 295 | sequencing |
| KNSL.14-5s | AGTCTCTTCACTTCCCACAC | 296 | sequencing |
| KNSL.14-6s | TTCCTCCAAAGCACAGAATC | 297 | sequencing |
| KNSL.f15 p01n | GAAGATTTACTAAGATCACGG | 298 | PCR |
| KNSL.f15 p02n | TTTTGAAATCTATTCTTAGCCA | 299 | PCR |
| KNSL.15-3s | TAACTCCTTTTAGAGCTTAT | 300 | sequencing |
| KNSL.15-3sb | GAAGATTTACTAAGATCACGG | 301 | sequencing |
| KNSL.15-4s | AATGAGAGGCGGGGTAAGAT | 302 | sequencing |
| KNSL.15-4sb | TTTTGAAATCTATTCTTAGCCA | 303 | sequencing |
| KNSL.15-5s | CTCTTATCTAATGTCCGTTA | 304 | sequencing |
| KNSL.15-6s | AACGGACATTAGATAAGAGG | 305 | sequencing |
| KNSL.16-p01 | TGTAGTCCCAGCTACCTG | 306 | PCR |
| KNSL.16-p02 | ATGGCAATAGTCTATGACAA | 307 | PCR |
| KNSL.16-3s | GGGCAACAGAGTGAGACTTG | 308 | sequencing |
| KNSL.16-3sb | TTATGGAAAAGGTAAGGGAAAA | 309 | sequencing |
| KNSL.16-4s | GCAATGGCAGGACCTAATTT | 310 | sequencing |
| KNSL.16-5s | TCATAAATTCCTCCCTGTCT | 311 | sequencing |
| KNSL.16-6s | AAAACAGTTACAGGCCGAGC | 312 | sequencing |
| KNSL.17-p01 | CAGCCTGGGCAACATAGTAT | 313 | PCR |
| KNSL.17-p02 | CTAAGTCCAAGGGCTTAAA | 314 | PCR |
| KNSL.17-3s | GCCTGGGCAACATAGTATAT | 315 | sequencing |
| KNSL.17-4s | ATTAATGAGAGGCGGGGTAA | 316 | sequencing |
| KNSL.17-5s | TTAGTTGCAAACAATGTCTG | 317 | sequencing |
| KNSL.17-6s | TACCTTTAACGGACATTAGA | 318 | sequencing |
| KNSL.17-6sb | AATGAGAGGCGGGGTAAGATTG | 319 | sequencing |
| KNSL.17-7s | GAAAAGGAAACAGCCTGAGC | 320 | sequencing |
| KNSL.17-8s | TTACCATCTCTGAGGATATA | 321 | sequencing |
| KNSL.18-p01 | AGAGACAATTCCGGTAAAT | 322 | PCR |
| KNSL.18-p02 | TTATGGGCAGAGATAGGTTC | 323 | PCR |
| KNSL.18-3s | TCTTACCCCGCCTCTCATTA | 324 | sequencing |
| KNSL.18-4s | CCCCTTATCAATATCAGATT | 325 | sequencing |
| KNSL.18-5s | TGGGCATTGGGTTATACTCA | 326 | sequencing |
| KNSL.18-6s | AGTATACTGCCCCAGAACTG | 327 | sequencing |
| KNSL.19-p01n | TGATGAGAACCACTACCCTG | 328 | PCR |
| KNSL.19-p02n | TTTAACAGAGACGAGGTTTT | 329 | PCR |
| KNSL.19-3s | AAGAAGGCATTTGGCGCTAC | 330 | sequencing |
| KNSL.19-3sb | TTTGCCTATAACCCAGAGAACT | 331 | sequencing |
| KNSL.19-4s | AAGTGAGCCGAGGAGAAAGC | 332 | sequencing |
| KNSL.19-5s | ACTTGGTTACAAAGAGCAGA | 333 | sequencing |
| KNSL.19-5sb | CTGCGAGCCCAGATCAACCTTT | 334 | sequencing |
| KNSL.19-6s | ATGAAACCCAATTTAATACA | 335 | sequencing |
| KNSL.19-6sb | AATCTATACACAAGGCTCAAGT | 336 | sequencing |
| KNSL.19-7s | GTGGCAAAACCTCGTCTCTG | 337 | sequencing |
| KNSL.19-8s | GCCCGGCTAATTTTTAACAG | 338 | sequencing |
| KNSL.19-9s | GGCAACAGAGCAAGACTCGG | 339 | sequencing |
| KNSL.19-10s | CTGGGCTCGCAGAGGTAATC | 340 | sequencing |
| KNSL.20-p01n | CGAGCCCAGATCAACCTT | 341 | PCR |
| KNSL.20-p02n | CCGAGGAGAAAGCGAAATAG | 342 | PCR |
| KNSL.20-3s | CGAGCCCAGATCAACCTT | 343 | sequencing |
| KNSL.20-4s | CCGAGGAGAAAGCGAAATAG | 344 | sequencing |
| KNSL.20-5s | CGTGGCAAAACCTCGTCTCTGT | 345 | sequencing |
| KNSL.20-6s | AAACATGAGATGGTCCTTTCTA | 346 | sequencing |

[0937] Polymorphic regions (such as SNPS, and the like) were discovered by comparing the sequenced samples to the reference KNSL1 sequence (SEQ ID NO: 347) and identifying nucleotides that varied from the reference nucleotide sequence at specific positions. SEQ ID NO: 347 represents the reverse complement of a 63,824 nucleotide portion of NCBI Accession# NT_{—}008769.1 starting at nucleotide 1,669,312 and ending at nucleotide 1,733,136. Table 6 shows the polymorphic regions that were identified, including previously identifed polymorphic regions identified (set forth as a yes in the public data column), and the type of nucleotide polymorphic change detected relative to the KNSL1 reference sequence set forth as SEQ ID NO: 347.

TABLE 6
(KNSL1 Polymorphic Regions)

| POLY- | POSITION | POSITION | | NUCLEOTIDE |
|---|---|---|---|---|
| MORPHISM | IN SEQ | IN SEQ | PUBLIC | CHANGE |
| NAME | ID NO:347 | ID NO:484 | DATABASE | DETECTED |
| US-565 | 300 | 138886 | NO | Insertion of GA |
| 1i.D + 69 | 1152 | 139739 | NO | G→T |
| 2i.A − 16 | 14235 | 152822 | NO | Insertion of T |
| 4i.D + 236 | 15104 | 153691 | NO | A→G |
| 7i.D + 55 | 20815 | 159403 | NO | T→C < |
| 10i.A − 212 | 36738 | 174814 | NO | CA→AC |
| 13i.D + 70 | 41015 | 178981 | NO | 5nt Insertion |
| 14i.D + 78 | 42125 | 180091 | NO | T→G |
| 18e.CDS + | 56706 | 194487 | NO | C→T |
| 2605 | | | | |
| 18i.D + 16 | 56887 | 194668 | NO | A→G |
| 19i.D + 57 | 58524 | 196261 | NO | C→T |

[0938] Upstream Sequence

[0939] Several polymorphisms were discovered upstream of the transcription start site of the KNSL1 gene. The polymorphism designated US-7082 occurs 7082 nucleotides upstream of the transcription start site (see nucleotide 132,370 of SEQ ID NO: 484). The polymorphic region designated US-6097 corresponds to the presence or absence of an insertion of an additional 6, 7 or 8 poly-T nucleotide between nucleotides 133354-133355 of SEQ ID NO: 484, which corresponds to the insertion at a position 6097 nucleotides 5′ to the transcription start site. This particular poly-T insertion follows the poly-T nucleotide sequence corresponding to nucleotides 133341-133354 of SEQ ID NO: 484. The polymorphic region designated US-565 corresponds to an insertion of an additional dinucleotide -CA- between any of the -CA- dinucleotides at nucleotides 270-299 of SEQ ID NO: 347, such as between nucleotides 299 and 300 of SEQ ID NO: 347. In one embodiment, the -CA- nucleotide insertion occurs at a position 565 nucleotides 5′ to the transcription start site. Thus, the allele corresponding to SEQ ID NO: 347 has a 15 dinucleotide (-CA-) repeat corresponding to nucleotides 270 to 299, while the US-565 allele identified herein has a 16 dinucleotide (-CA-) by the addition of a dinucleotide -CA- between any one of the 15 dinucleotide repeats, such as nucleotides 299 and 300 of SEQ ID NO: 347. These polymorphisms are located in putative promoter or enhancer regions of the KNSL1 gene and may affect the expression of the KNSL1 gene.

[0940] Intervening Sequences

[0941] Several polymorphic regions corresponding to SNPs, single-nucleotide insertions, dinucleotide inversions, multi-nucleotide insertions, were identified herein in introns when compared to SEQ ID NO: 347. For example, polymorphic region 1i.D+69 (at position 1152 of SEQ ID NO: 347) corresponds to a SNP located in the intron between exon 1 and exon 2, 69 nucleotides 3′ of the splice donor site. The polymorphic region labeled 1i.A-4641 corresponds to a 4-nucleotide insertion occurring between exons 1 and 2, 4641 nucleotides 5′ of the splice acceptor site of exon 2, where the oligonucleotide AGTT is inserted at a position corresponding to nucleotides 147842-147845 of SEQ ID NO: 484. Polymorphic region 2iA.-16 corresponds to an insertion of a T nucleotide after any one of the poly-T nucleotides at positions 14222 through 14234 of SEQ ID NO: 347. Nucleotide 14234 is 16 nucleotides 5′ of the splice acceptor site of exon 3. Polymorphic region corresponding to the SNP labeled 4i.D+236 (nucleotide 15104 of SEQ ID NO: 347) is located between exons 4 and 5, 236 nucleotides 3′ of the splice donor site. Polymorphic region corresponding to the SNP labeled 7i.D+55 (nucleotide 20815 of SEQ ID NO: 347) is located between exons 7 and 8, 55 nucleotides 3′ of the splice donor site. The polymorphic region labeled 10i.A-212 corresponds to a dinucleotide inversion occurring between exons 10 and 11, where the dinucleotide CA- at positions 36738-36739 of SEQ ID NO: 347 is replaced with the inverted -AC- dinucleotide at the same nucleotide positions. The polymorphic region labeled 13i.D+70 corresponds to a 5-nucleotide insertion occurring between exons 13 and 14, 70 nucleotides 3′ of the splice donor site, where the oligonucleotide -AATTT- is inserted between nucleotides 41014 and 41015 of SEQ ID NO: 347, which also corresponds to between nucleotides 17890-178981 of SEQ ID NO: 484. Polymorphic region corresponding to the SNP labeled 14i.D+78 (nucleotide 42125 of SEQ ID NO: 347) is located between exons 14 and 15, 78 nucleotides 3′ of the splice donor site. Polymorphic region corresponding to the SNP labeled 18i.D +16 (nucleotide 56887 of SEQ ID NO: 347) is located between exons 18 and 19, 16 nucleotides 3′ of the splice donor site. Polymorphic region corresponding to the SNP labeled 19i.D +57 (nucleotide 58524 of SEQ ID NO: 347) is located between exons 18 and 19, 16 nucleotides 3′ of the splice donor site. These polymorphisms are contemplated herein as potentially affecting the splicing of the KNSL1 RNA.

[0942] Coding Sequence

[0943] Polymorphic region corresponding to the SNP labeled 18e.CDS+2605 (nucleotide 56706 of SEQ ID NO: 347) is located in exon 19 and results in an amino acid change from R to C at position amino acid 869 of KNSL1 (see SEQ ID NOs: 471-476 provided herein). GenBank Accession numbers XM_{—}005889, XM_{—}051151 and XM_{—}051152 denote well-known sequences for a KNSL1 cDNA.

[0944] Table 6-B shows additional KNSL1 polymorphic regions that were identified, including previously identifed polymorphic regions (set forth as a yes in the public database column), and the type of nucleotide polymorphic change detected relative to the KNSL reference genomic sequence that corresponds to approximately nucleotides 130,000 to the end of SEQ ID NO: 484.

TABLE 6-B

| | POSITION | | NUCLEOTIDE |
|---|---|---|---|
| POLYMORPHISM | IN SEQ | PUBLIC | CHANGES |
| NAME | ID NO:484 | DATABASE? | DETECTED |
| KNSL1_us-8576 | 130876 | NO | C→T |
| KNSL1_us-8074 | 131378 | NO | A→G |
| KNSL1_us-7836 | 131616 | NO | A→G |
| KNSL1_us-7832 | 131620 | NO | A→G |
| KNSL1_us-7764 | 131688 | NO | T→G |
| KNSL1_us-7454 | 131998- | NO | Deletion of |
| | 132003 | | -CTTTTC- |
| KNSL1_us-7448 | 132004 | NO | 9, 16, 21, 26 or |
| | | | 29 bp poly-T |
| | | | Repeat |
| KNSL1_us-7082 | 132370 | YES | G→A |
| KNSL1_us-6755 | 132697 | NO | A→G |
| KNSL1_us-6484 | 132968 | NO | C→T |
| KNSL1_us-6097 | 133355 | NO | 6, 7 or 8 base pair |
| | | | poly-T Repeat |
| KNSL1_us-5646 | 133806 | NO | T→G |
| KNSL1_us-5422 | 134030 | NO | G→A |
| KNSL1_us-5161 | 134291 | NO | G→A |
| KNSL1_us-4791 | 134661 | NO | G→A |
| KNSL1_us-2365 | 137087 | NO | A→G |
| KNSL1_us-2310 | 137142 | NO | G→A |
| KNSL1_us-1056 | 138396 | NO | C→T |
| KNSL1_1i.D + 995 | 140665 | NO | T→G |
| KNSL1_1i.D + 1066 | 140736 | NO | A→G |
| KNSL1_1i.D + 1503 | 141173 | NO | A→G |
| KNSL1_1i.D + 2386 | 142056 | NO | T→C |
| KNSL1_1i.D + 3107 | 142777 | NO | -AG- Insertion |
| KNSL1_1i.D + 3355 | 143025 | NO | T→G |
| KNSL1_1i.D + 4059 | 143729 | NO | C→A |
| KNSL1_1i.D + 4814 | 144484 | NO | A→T |
| KNSL1_1i.A − 6302 | 146181 | NO | T→A |
| KNSL1_1i.A − 5432 | 147051 | NO | G→A |
| KNSL1_1i.A − 5160 | 147322 | NO | C→T |
| KNSL1_1i.A − 4775 | 147707 | NO | G→T |
| KNSL1_1i.A − 4641 | 147842 | NO | Deletion of |
| | | | -AGTT- |
| KNSL1_1i.A − 4403 | 148080 | NO | C→T |
| KNSL1_1i.A − 3455 | 149026 | NO | 17, 18, 19 or 22 |
| | | | bp -AC- Repeat |
| KNSL1_1i.A − 3439 | 149044 | NO | 22, 24, 28, 30, 32 |
| | | | or 36 bp -GT- |
| | | | Repeat |
| KNSL1_1i.A − 3094 | 149389 | NO | G→A |
| KNSL1_1i.A − 2480 | 150003 | NO | G→A |
| KNSL1_1i.A − 2099 | 150384 | NO | G→T |
| KNSL1_1i.A − 2029 | 150454 | NO | C→T |
| KNSL1_1i.A − 1797 | 150686 | NO | G→T |
| KNSL1_1i.A − 1140 | 151343 | NO | C→T |
| KNSL1_1i.A − 522 | 151961 | NO | C→T |
| KNSL1_1i.A − 364 | 152119 | NO | C→T |
| KNSL1_4i.6 | 153791 | NO | C→G |
| KNSL1_4i.5 | 154328 | NO | A→T |
| KNSL1_4i.4 | 154513 | NO | C→A |
| KNSL1_4i.3 | 154639 | NO | G→A |
| KNSL1_4i.1 | 155049 | NO | T→C |
| KNSL1_4i.2 | 155114 | NO | T→C |
| KNSL1_6i.1 | 158040 | NO | C→A |
| KNSL1_6i.2 | 158895 | NO | G→A |
| KNSL1_17i.1 | 191284 | NO | C→T |
| KNSL1_18i.1 | 192272 | NO | C→T |
| KNSL1_18i.2 | 192698 | NO | A→T |
| KNSL1_18i.3 | 193706 | NO | T→A |

[0945] Other known SNPs in the KNSL1 gene contemplated for use in the various diagnostic and screening methods, as well as kits and solid supports, provided herein include the NCBI SNPs set forth in Table C and Table C-2, which are referenced by their respective locations in FIG. 3 and SEQ ID NO: 347; and in FIG. 6 and SEQ ID NO: 484, respectively.

TABLE C
KNSL1 NCBI Polymorphisms

| NCBI | | POSITION IN |
|---|---|---|
| SNP ID NO. | POLYMORPHISM | SEQ ID NO:347 |
| rs1573051 | C/T | 35719 |
| rs1972360 | C/T | 45083 |
| rs1547818 | C/G | 45887 |
| rs1044146 | C/T | 62661 |
| rs1044153 | A/C | 63802 |

[0946] TABLE C-2
KNSL1 NCBI Polymorphisms

| NCBI | | POSITION IN |
|---|---|---|
| SNP ID NO. | POLYMORPHISM | SEQ ID NO:484 |
| rs2421941 | C/T | 132370 |
| rs1889894 | A/G | 136968 |
| rs2297743 | G/C | 139284 |
| rs2275220 | T/C | 159167 |
| rs2275219 | A/G | 159403 |
| rs1573051 | C/T | 173795 |
| rs2275217 | G/A | 178748 |
| rs3051599 | ACAG/C | 180149 |
| rs1972360 | C/T | 183049 |
| rs2421946 | A/T | 180153 |
| rs1547818 | C/G | 183853 |
| rs1044146 | C/T | 200398 |
| rs1044153 | A/C | 201539 |

[0947] Amplification and Genotyping KNSL1 Haplotype Polymorphism:

[0948] As set forth herein, an exemplary haplotype useful in the methods provided herein for determining a predisposition or occurrence of neurodegenerative disease, such as Alzheimer's disease, comprises multiple polymorphic regions of the KNSL1 gene corresponding to nucleotides 132370, 133355, 147842 and 178981 of SEQ ID NO: 484. In a particular embodiment, the nucleotide(s) detected in this particular KNSL1 haplotype: at position 132370 of SEQ ID NO: 484 is A (also referred to herein as KNSL US-7082); between the nucleotides at positions 133354-133355 of SEQ ID NO: 484 is the presence of a 6, 7 or 8 base pair poly-T insertion corresponding to -TTTTTT(T)(T)- that follow the poly-T sequence at nucleotides 133341-133354 of SEQ ID NO: 484 (also referred to herein as KNSL US-6097); beginning at position 147842-147845 of SEQ ID NO: 484 is the presence of a 4 base pair insertion corresponding to -AGTT- (also referred to herein as KNSL 1i.A-4641), and between the nucleotides at positions 178980-178981 of SEQ ID NO: 484 is the presence of a 5 base pair insertion corresponding to -AATTT- (also referred to herein as KNSL 13i.D+70). This -AATTT- insertion immediately follows the -AATTT- sequence corresponding to nucleotides 178976-178980 in SEQ ID NO: 484.

[0949] The polymorphic regions of the KNSL1 gene corresponding to nucleotides 132370, 133355, 147842 and 178981 of SEQ ID NO: 484 can be genotyped using well known methods and the PCR amplification and FP-SBE primers set forth in FIG. 7. For example, all genotypes were generated either using fluorescent polarization detected single base extension (FP-SBE, “Criterion Analyst AD”, Molecular Devices, Inc.), single base extension using capillary electrophoresis (using the “SNuPe” software on a “MegaBACE-1000” genotyping/sequencing system, Amersham-Pharmacia) or by capillary electrophoresis of PCR products using fluorescently labeled primers (using the “Genetic Profiler” software on the “MegaBACE 1000”). Generally, PCR primers were designed to yield products between 200-400 bp in length and added to ˜10 ng of genomic DNA using individually optimized PCR conditions. PCR primers and unincorporated dNTPs were degraded by the direct addition of exonuclease I (0.1-0.15 U/rxn) and shrimp alkaline phosphatase (1U/rxn). The single base extension step was carried out using Thermosequenase (0.4 U/rxn) and the appropriate mix of R110-ddNTP, TAMRA-ddNTP (3 mM), and all four unlabeled ddNTPs (22 or 25 μM) to the Exol/SAP treated PCR product. To assess genotyping quality, 10% of the samples were randomly duplicated and called twice. Primer sequences, PCR and SBE cycling conditions are set forth in FIG. 7.

[0950] TNFRSF6

[0951] The nucleotide sequence of the TNFRSF6 gene in the “D10-E16” set was determined. The “D10-E16” set was derived from sixteen genomic DNA samples from four families showing the highest LOD scores for linkage with LOAD at 6 markers (D10S564, D10S583, D10S1710, D10S566, D10S1671 and D10S1741). The set contained individuals affected with AD and individuals who were unaffected.

[0952] Genomic sequence was from AL157394 (GenBank Accession number). Exon-intron structure was determined, as previously described, from cDNA sequences from GenBank Accession numbers XM_{—}048187, XM_{—}048189, XM_{—}048190, XM_{—}048193 and XM_{—}048194.

[0953] Based on this information, primers were designed to amplify regions of interest from genomic DNA and to sequence these regions on both strands. Amplification and sequencing primers are shown in Table 7.

TABLE 7

Primers for TNFRSF6 Genomic PCR and Sequencing

| | | | |
|---|---|---|---|
| PRIMER NAME | SEQUENCE | PURPOSE | SEQ ID NO: |

| | | | |
|---|---|---|---|
| TNFRSF6.pro.p1 | CTT CCT CAT GGC ACT AAC AGT C | PCR | 349 |
| TNFRSF6.pro.p2 | AAG TCA CTC GTA AAC CGC TTC C | PCR | 350 |
| TNFRSF6.pro.s1 | AAC AGA GAC AAG CCT ATC AA | Sequencing | 351 |
| TNFRSF6.pro.s2 | TAT TGC TTT GGA ACG GTA GA | Sequencing | 352 |
| TNFRSF6.pro.s3 | CCA AAC ATA CCT TCT GTA AA | Sequencing | 353 |
| TNFRSF6.pro.s4 | ACA AAT GGG CAT TCC TGT C | Sequencing | 354 |
| TNFRSF6.pro.s5 | GGA CAG CCC AGT CAA ATG | Sequencing | 355 |
| TNFRSF6.pro.s6 | GGG AGG GCT CCA TTG ATT | Sequencing | 356 |
| TNFRSF6.exon01.p1 | GGA GGC CGG CTC TCG AGG TC | PCR | 357 |
| TNFRSF6.exon01.p2 | GGG TCA GCA CTT CGC ATC AA | PCR | 358 |
| TNFRSF6.exon01.s1 | GAC AGG AAT GCC CAT TTG | Sequencing | 359 |
| TNFRSF6.exon01.s2 | CAA GTC CTC CAG CGT TCT | Sequencing | 360 |
| TNFRSF6.exon02.p1 | CCA CAA ACA CAG GGC AGT AAG T | PCR | 361 |
| TNFRSF6.exon02.p2 | TCT CAT TTC AGA GGT GCA TGT C | PCR | 362 |
| TNFRSF6.exon02.s1 | AGT GGA GCC CTC ACA TTG TC | Sequencing | 363 |
| TNFRSF6.exon02.s2 | ATA AAT AAA ACT CAT CTT TGG A | Sequencing | 364 |
| TNFRSF6.exon03.p1 | TGT ATG CTC CTG TTG CTA ATC A | PCR | 365 |
| TNFRSF6.exon03.p2 | GCA CCA TTA TAT AAG CGT AAG T | PCR | 366 |
| TNFRSF6.exon03.s1 | TAC CTG CCC GTG TCC TGT | Sequencing | 367 |
| TNFRSF6.exon03.s2 | TGG AAG AAT TGC CTA GAC T | Sequencing | 368 |
| TNFRSF6.exon04.p1 | GTA TTG GCC TGA TGG AGT AAG T | PCR | 369 |
| TNFRSF6.exon04.p2 | TAA CAC CTG GAA CAT AAG TCT C | PCR | 370 |
| TNFRSF6.exon04.s1 | TAG AGG AAC AGG GGA GAC G | Sequencing | 371 |
| TNFRSF6.exon04.s2 | TGC TTC TGG ACT GAT ACC TT | Sequencing | 372 |
| TNFRSF6.exon05.p1 | CAG AGT CAT TCC TTA TGA TAT T | PCR | 373 |
| TNFRSF6.exon05.p2 | GGC AAA TCT TTG TGA ACT ACT T | PCR | 374 |
| TNFRSF6.exon05.s1 | TTG TGC CAG CTT TAG ATA C | Sequencing | 375 |
| TNFRSF6.exon05.s2 | AAA GCC ACC CCA AGT TAG AT | Sequencing | 376 |
| TNFRSF6.exon06.p1 | CTA ATT TAC AAA GTG CCA TTG A | PCR | 377 |
| TNFRSF6.exon06.p2 | CAT AGG AAG GAT GAG AAT ACC A | PCR | 378 |
| TNFRSF6.exon06.s1 | GTA ATG GGC AGA GGC TGT G | Sequencing | 379 |
| TNFRSF6.exon06.s2 | CAG GGG CAA GAA ATT AAC A | Sequencing | 380 |
| TNFRSF6.exon07.p1 | ATG TCC TTT CAC TAG AAC ACT T | PCR | 381 |
| TNFRSF6.exon07.p2 | TAG TCC CAG GGT CAC AGT TGA G | PCR | 382 |
| TNFRSF6.exon07.s1 | AGC GGT CTC CTG CGA TGT | Sequencing | 383 |
| TNFRSF6.exon07.s2 | CTT GAG CCC AGG ACT TTG | Sequencing | 384 |
| TNFRSF6.exon08.p1 | CTT GCC TTT AAA AAC TAA GAC A | PCR | 385 |
| TNFRSF6.exon08.p2 | GCA GGA GTT CTG TAA TAC ATC T | PCR | 386 |
| TNFRSF6.exon08.s1 | CCT AAT TTT ATA CAT CAA GCA | Sequencing | 387 |
| TNFRSF6.exon08.s2 | TAA ACA AAC TGC CTG ATA AA | Sequencing | 388 |
| TNFRSF6.exon09.p1 | ACA GAA ATG TTA TGT ATT GTG G | PCR | 389 |
| TNFRSF6.exon09.p2 | ACA CTC CTA TTT GGG TAC TTA G | PCR | 390 |
| TNFRSF6.exon09.s1 | ATG GTT TTC ACT AAT GGG A | Sequencing | 391 |
| TNFRSF6.exon09.s2 | CTA CAA ATA TGT TGG CTC TTC | Sequencing | 392 |
| TNFRSF6.3′UTR.p1 | GAA AGA AAG AAG CGT ATG ACA C | PCR | 393 |
| TNFRSF6.3′UTR.p2 | CCA AAA AGC AAG CCC CTA CCA A | PCR | 394 |
| TNFRSF6.3′UTR.s1 | GAA GCG TAT GAC ACA TTG AT | Sequencing | 395 |
| TNFRSF6.3′UTR.s2 | TCT ACA AAT ATG TTG GCT CT | Sequencing | 396 |
| TNFRSF6.3′UTR.s3 | ACC CCA CTC TAT GAA TCA A | Sequencing | 397 |
| TNFRSF6.3′UTR.s4 | CAA GGC AAA AAT GGA GAG | Sequencing | 398 |
| TNFRSF6.3′UTR.s5 | AAA TAA GGC TCT ACC TCA AA | Sequencing | 399 |
| TNFRSF6.3′UTR.s6 | AAT GGA AGT TCT TTA GGT GG | Sequencing | 400 |

[0954] Several polymorphic regions were identified in the human TNFRSF6 gene. These are listed in Table 8. These were discovered by comparing the sequenced samples to the reference TNFRSF6 sequence (SEQ ID NO: 402). SEQ. ID NO: 402 represents the reverse complement of a 2818 nucleotide portion of AL157394.11 starting at nucleotide 17,215 and ending at nucleotide 45,332. Table 8 shows the polymorphic regions that were identified, including those previously identified (set forth as yes in public data column), the position in SEQ ID NO: 402 and the nucleotide change detected relative to the reference sequence.

TABLE 8
TNFRSF6 Polymorphic Regions

| | NUCLEOTIDE | POSITION | |
|---|---|---|---|
| POLYMORPHISM | CHANGE | IN SEQ | PUBLIC |
| NAME | DETECTED | ID NO:402 | DATABASE? |
| US-470 | T→C | 1530 | Yes |
| US-450 | A→G | 1550 | Yes |
| us.3 | G→A | 1926 | No |
| 1i.1 | G→A | 2269 | No |
| 2e.CDS + 183 | G→A | 14525 | No |
| 2i.D + 176 | C→T | 14714 | No |
| 2i.2 | C→T | 18934 | Yes |
| 2i.A − 62 | G→C | 18982 | Yes |
| 3e.CDS + 222 | A→G | 19069 | Yes |
| 3i.1 | C→T | 19227 | Yes |
| 4i.D + 71 | A→G | 20412 | No |
| 4i.D + 211 | A→G | 20552 | No |
| 5i.1 | C→G | 22026 | Yes |
| 6i.A − 144 | G→A | 23199 | No |
| 7e.CDS + 642 | T→C | 23416 | Yes |
| 8i.D + 179 | A→G | 24890 | Yes |
| 9e.3′UTR + 564 | A→T | 26359 | Yes |

[0955] Upstream Sequence

[0956] Several polymorphisms were discovered upstream of the transcription start site of the TNFRSF6 gene (nucleotide 2001 of SEQ ID NO: 402); US-470 (470 nucleotides upstream) and US-450 (450 nucleotides upstream). These polymorphisms are located in putative promoter or enhancer regions of the TNFRSF6 gene and as such a nucleotide change may affect the expression of the TNFRSF6 gene.

[0957] Intervening Sequences

[0958] 2i.D+176 and 2i.A-62 are located in the intron between exon 2 and exon 3, 176 nucleotides 3′ of the splice donor site and 62 nucleotides 5′ of the splice acceptor site, respectively; 4i.D+71 and 4i.D+211 are located in the intron between exon 4 and exon 5, 71 nucleotides and 211 nucleotides 3′ of the splice donor site, respectively; 6i.A-144 is located in the intron between exon 6 and exon 7, 144 nucleotides 5′ of the splice acceptor site; 8iD+179 is located in the intron between exon 8 and exon 9, 179 nucleotides 3′ to the splice donor site. These polymorphisms may affect splicing of the TNFRSF6 RNA.

[0959] Coding Sequence

[0960] 2e.CDS+183 is located in the second exon of the coding region and does not result in an amino acid change; 3e.CDS+222 is positioned in the third exon of the coding region and does not result in an amino acid change; 7e.CDS+642 is located in the seventh exon of the coding region and does not result in an amino acid change. However, these changes may affect splicing, codon usage or mRNA stability. SEQ ID NO: 479 denotes sequence for a TNFRSF6 cDNA, based on GenBank Accession number XM_{—}048190. 2e.CDS+183, 3e.CDS+222 and 7e.CDS+642 are located at nucleotide positions 403, 442 and 862 of SEQ ID NO: 479, respectively. SEQ ID NOs: 477, 478, 480 and 481 denote also sequence for other TNFRSF6 cDNAs, based on Genebank Accession numbers XM_{—}048187, XM_{—}048189, XM_{—}048193 and XM_{—}048194, respectively. 2e.CDS+183 and 7e.CDS+642 are located at nucleotide positions 208 and 420 of SEQ ID NO: 477, respectively. 2e.CDS+183, 3e.CDS+222 and 7e.CDS+642 are located at nucleotide positions 377, 416 and 836 of SEQ ID NO: 478, respectively. 2e.CDS+183, 3e.CDS+222 and 7e.CDS+642 are located at nucleotide positions 208, 247 and 604 of SEQ ID NO: 480, respectively. 2e.CDS+183 and 3e.CDS+222 are located at nucleotide positions 208 and 247 of SEQ ID NO: 481, respectively.

[0961] 3′ UTR Sequence

[0962] 9e.3′UTR+564 is located in the 3′ untranslated sequence, 564 nucleotides 3′ of the stop codon and may affect RNA stability or processing, polyadenylation of the TNFRSF6 transcript, etc. 9e.3′UTR+564 is located at nucleotide position 1766 of SEQ ID NO: 478 and nucleotide position 1792 of SEQ ID NO: 479. Other known SNPs in the TNFRSF6 gene contemplated for use in the various diagnostic and screening methods, as well as kits and solid supports, provided herein include the NCBI SNPs set forth in Table D, which are referenced by their respective locations in FIG. 4 and in SEQ ID NO: 402.

TABLE D
TNFRSF6 NCBI Polymorphisms

| | | POSITION IN |
|---|---|---|
| NCBI SNP ID NO. | POLYMORPHISM | SEQ ID NO:402 |
| rs1926198 | A/G | 199 |
| rs1926197 | A/G | 213 |
| rs2234767 | A/G | 843 |
| rs4064 | G/C | 2967 |
| rs1324551 | C/T | 3103 |
| rs1926196 | C/T | 5335 |
| rs1926195 | A/G | 5345 |
| rs2031610 | C/T | 6074 |
| rs1571011 | A/C | 9374 |
| rs1571012 | C/T | 9907 |
| rs1571013 | A/G | 9936 |
| rs2147421 | C/T | 10937 |
| rs2147420 | A/G | 11200 |
| rs1159120 | C/T | 11279 |
| rs2148287 | C/T | 11359 |
| rs2147419 | G/T | 11503 |
| rs2148286 | A/G | 11511 |
| rs2417418 | C/T | 11587 |
| rs2182408 | C/T | 11694 |
| rs1926194 | A/G | 11905 |
| rs1926193 | C/T | 12193 |
| rs1926192 | A/G | 12208 |
| rs1926191 | A/G | 12238 |
| rs2031613 | C/T | 18511 |
| rs2031612 | C/T | 18567 |
| rs1926190 | A/G | 20640 |
| rs982764 | C/T | 21585 |
| rs1571020 | C/T | 22439 |
| rs1977389 | G/T | 25081 |
| rs1468063 | C/T | 26878 |
| rs1800623 | A/G | 27670 |

[0963] LIPA

[0964] The nucleotide sequence of the LIPA gene in the “D10-E16” set was determined. The “D10-E16” set was derived from sixteen genomic DNA samples from four families showing the highest combined LOD scores for linkage with LOAD at 6 markers (D10S564, D10S583, D10S1710, D10S566, D10S1671 and D10S1741). The set contained individuals affected with AD and unaffected individuals. Genomic sequence from AL513533.8 and AL353751.11 (GenBank accession numbers) was used to identify exons and design primers. Exon-intron structure was determined, as previously described, from cDNA sequence from NM_{—}000235.

[0965] Based on this information, primers were designed to amplify regions of interest from genomic DNA and to sequence those regions on both strands. Amplification and sequencing primers are shown in Table 9.

TABLE 9

Primers for LIPA Genomic PCR and Sequencing

| | | | |
|---|---|---|---|
| NAME | SEQUENCE (5′→3′) | PURPOSE | SEQ ID NO: |

| | | | |
|---|---|---|---|
| LIPA01C-F1 | CATATCATCCTCCTTATCCCT | PCR | 404 |
| LIPA01C-F2 | TGGCATGATCTCCGCTCACT | Sequencing | 405 |
| LIPA01C-R1 | TCTATAAATGAAAGTGAATCATGG | PCR | 406 |
| LIPA01C-R2 | GAAAGTGAATCATGGGCTCC | Sequencing | 407 |
| LIPA01B-F1 | GGTTTCTATACCTCCACTGTCTTAC | PCR | 408 |
| LIPA01B-F2 | TGCCTGGCATTTAGTAGGTG | Sequencing | 409 |
| LIPA01B-R1 | GACTATTTGTTCAGCCAATCAG | PCR | 410 |
| LIPA01B-R2 | CGGGAAGTGCCTCGGAGACT | Sequencing | 411 |
| LIPA01-F1 | CGCCTAAAACAGCCTTTGCTAAGA | PCR | 412 |
| LIPA01-F2 | GACGCGCTGGTAGAGCTGT | Sequencing | 413 |
| LIPA01-R1 | CTGAAGTTGCCCTGGTTGATTG | PCR | 414 |
| LIPA01-R2 | TGAGCCAACGCCCGCAGAAA | Sequencing | 415 |
| LIPA02-F1 | GCAAGACTCCATCTCAACA | PCR | 416 |
| LIPA02-F2 | GACTCCATCTCAACATAAAT | Sequencing | 417 |
| LIPA02-F3 | ACTTGCCCTAAATCTGGTTC | Sequencing | 418 |
| LIPA02-R1 | GGTGAAACCCTGTATCTACTAAAT | PCR | 419 |
| LIPA02-R2 | CGCAATGAGCCGAGATCACA | Sequencing | 420 |
| LIPA02-R3 | TAACTGGATCGGGGAAATAG | Sequencing | 421 |
| LIPA03-F1 | GCCCAAGATGTGGTAAAGT | PCR | 422 |
| LIPA03-F2 | ACCGGTAGGTGGAACACAAG | Sequencing | 423 |
| LIPA03-R1 | TAGCATATCCTCAAATGAATCTG | PCR | 424 |
| LIPA03-R2 | AATGAATCTGGCCTTTGAAC | Sequencing | 425 |
| LIPA04-F1 | TTTTGCTGCTTACATAAGTGTG | PCR | 426 |
| LIPA04-F2 | TGCTACCTTGCCAGTGCTGT | Sequencing | 427 |
| LIPA04-R1 | CCAGAAATGCCGAAGTAAC | PCR | 428 |
| LIPA04-R2 | GCCGAAGTAACTTAAGAATT | Sequencing | 429 |
| LIPA05-F1 | ACTACCCAAATGCATGTCA | PCR | 430 |
| LIPA05-F2 | CTTTTGGGAGACACAACTGG | Sequencing | 431 |
| LIPA05-R1 | TTCTACTCTCTCACATCCCTATCT | PCR | 432 |
| LIPA05-R2 | CATCCCTATCTTGCTTCATC | Sequencing | 433 |
| LIPA06-F1 | GAGATTTGGAGCAAGCATTAAC | PCR | 434 |
| LIPA06-F2 | TGTTAGGGCACACGGAAGTT | Sequencing | 435 |
| LIPA06-R1 | AGGTGGGCAGAGCTGTACT | PCR | 436 |
| LIPA06-R2 | ATGAGTACACGTGGCACCAG | Sequencing | 437 |
| LIPA06-R3 | CATAGGGCTAGTACAGAAGG | Sequencing | 438 |
| LIPA07-F1 | TCCCACTGTAGAAGTCCG | PCR | 439 |
| LIPA07-F2 | GTAGAAGTCCGCTGAAAACT | Sequencing | 440 |
| LIPA07-R1 | GACAGATCTCCTCATTCAATAAT | PCR | 441 |
| LIPA07-R2 | ACCACAGTCAGCCTGAGGAT | Sequencing | 442 |
| LIPA07-R3 | AATCAAATCTTACTATAAACATGC | Sequencing | 443 |
| LIPA08-F1 | CCCACACAGTCCCGTGCTTA | PCR | 444 |
| LIPA08-F2 | TCCCGTGCTTACCATGTTGT | Sequencing | 445 |
| LIPA08-R1 | CCCAGTAGCTGTTTGTGAACCC | PCR | 446 |
| LIPA08-R2 | TAACACAGTGTGCCCCACCA | Sequencing | 447 |
| LIPA09-F1 | CAGGAGCAACTGTTGATCTAGTAT | PCR | 448 |
| LIPA09-F2 | GCTGCTTTCTTGTGTCAGGT | Sequencing | 449 |
| LIPA09-R1 | CAGGCTATGTTCGTGATTACTCT | PCR | 450 |
| LIPA09-R2 | CAAAGAGAGGAGGCCCAGTC | Sequencing | 451 |
| LIPA10A-F1 | GAAGTAGGAGGGCATGACC | PCR | 452 |
| LIPA10A-F2 | CACAGCTAGTGGCGATTAT | Sequencing | 453 |
| LIPA10A-F3 | AGGACATGCTTGTGCCGACT | Sequencing | 454 |
| LIPA10A-R1 | ACTGGGCATCTTCAAAGTTATC | PCR | 455 |
| LIPA10A-R2 | AAACAAAAGACCTGGGAAAG | Sequencing | 456 |
| LIPA10B-F1 | ACCACCAAGTCAATGATTATGTCA | PCR | 457 |
| LIPA10B-F2 | ACTTGTTTTTCTTTCCCAGG | Sequencing | 458 |
| LIPA10B-R1 | GTATAGTCTCCACAGGGATTTGC | PCR | 459 |
| LIPA10B-R2 | TTTGAAGACGCCGGAAAACT | Sequencing | 460 |
| LIPA10C-F1 | TGCCAGTAATAAGGATGCTAACAA | PCR | 461 |
| LIPA10C-F2 | TCAAACCTAACTGTGACAGC | Sequencing | 462 |
| LIPA10C-F3 | TGCCCATGAGAAGTGTCCTT | Sequencing | 463 |
| LIPA10C-R1 | AAAGGGAAGAACCGGATGA | PCR | 464 |
| LIPA10C-R2 | GAAGAACCGGATGACTGTTA | Sequencing | 465 |
| LIPA10C-R3 | CCGGACAGTATTGTAAGGAA | Sequencing | 466 |

[0966] Several polymorphic regions have been identified in the human LIPA gene. These are listed in Table 10. These were discovered by comparing the sequenced samples to the reference LIPA sequence corresponding to nucleotides 6,017,146 through 6,057,323 of NT_{—}008679.5 (SEQ ID NO: 467). Table 10 shows the polymorphic regions that were identified, including those previously identified (set forth as yes in public data column), the position in SEQ ID NO: 467 and the nucleotide change detected relative to the reference sequence.

TABLE 10
LIPA Polymorphic Regions

| POLY- | | POSITION | |
|---|---|---|---|
| MORPHISM | NUCLEOTIDE | IN SEQ | PUBLIC |
| NAME | CHANGE DETECTED | ID NO:467 | DATABASE? |
| US-703 | C→G | 1197 | No |
| US-593 | ATC→Δ3 | 1307-1309 | Yes |
| US-59 | A→C | 1841 | Yes |
| US-48 | G→A | 1852 | Yes |
| 1i.D + 36 | G→A | 2075 | Yes |
| 1i.A − 64 | G→T | 6063 | Yes |
| 2e.CDS + 46 | A→C | 6173 | Yes |
| 2e.CDS + 67 | G→A | 6194 | Yes |
| 2i.A − 163 | C→G | 7820 | No |
| 3i.A − 95 | G→C | 25283 | Yes |
| 5i.A − 95 | TCCGCGAGAGGGC→ | 28453-28465 | Yes |
| | Δ13 | | |
| 5i.A − 5 | C→T | 28543 | No |
| 6i.D + 62 | A→C | 28746 | No |
| 6i.A − 42 | G→A | 29904 | Yes |
| 9i.D + 46 | C→T | 37861 | Yes |
| 10e.3′UTR + | T→A | 39834 | Yes |
| 909 | | | |
| 10e.3′UTR + | C→T | 40018 | Yes |
| 1093 | | | |

[0967] Upstream Sequence

[0968] Several polymorphisms were discovered upstream of the transcription start site of the LIPA gene (nucleotide 1895 of SEQ ID NO: 467); US-703 (703 nucleotides upstream), US-593 (593 nucleotides upstream), US-59 (59 nucleotides upstream) and US-48 (48 nucleotides upstream). These polymorphisms are located in putative promoter or enhancer regions of the LIPA gene and as such a nucleotide change may affect the expression of the LIPA gene.

[0969] Intervening Sequences

[0970] 1i.D+36 and 1i.A-64 are located in the intron between exon 1 and exon 2, 36 nucleotides 3′ of the splice donor site and 64 nucleotides 5′ of the splice acceptor site, respectively; 2i.A-163 is located in the intron between exon 2 and exon 3, 163 nucleotides 5′ of the splice acceptor site; 3i.A-95 is located in the intron between exon 3 and exon 4, 95 nucleotides 5′ of the splice acceptor site; 5i.A-95 and 5i.A-5 are located in the intron between exon 5 and exon 6, 95 nucleotides 5′ and 5 nucleotides 5′ of the splice acceptor site, respectively; 6i.D+62 and 6i.A-42 are located in the intron between exon 6 and exon 7, 62 nucleotides 3′ of the splice donor site and 42 nucleotides 5′ of the splice acceptor site, respectively; 9i.D+46 is located in the intron between exon 9 and exon 10, 46 nucleotides 3′ of the splice donor site. The polymorphic region labeled 5i.A-95 corresponds to a deletion of nucleotides TCCGCGAGAGGGC at positions 28453-28465 in SEQ ID NO: 467. These polymorphisms may affect splicing of the LIPA RNA.

[0971] Coding Sequence

[0972] 2e.CDS+46 and 2e.CDS+67 are located in the second exon of the coding region of the LIPA gene. 2e.CDS+46 results in an amino acid change at residue 16 from T to P. 2e.CDS+67 results in an amino acid change at residue 23 from G to R. These are both missense mutations in a putative 27-residue leader sequence. GenBank Accession number NM_{—}000235 denotes the sequence for a LIPA cDNA (SEQ ID NO: 482). 2e.CDS+46 and 2e.CDS+67 are located in SEQ ID NO: 482 at nucleotides 86 and 107, respectively.

[0973] 3′ UTR Sequence

[0974] 10e.3′UTR+909 and 10e.3′UTR+1093 are located in the 3′ untranslated sequence, 909 and 1093 nucleotides 3′ of the stop codon, respectively and may affect, among other processes, stability, RNA processing, polyadenylation of the LIPA transcript. 10e.3′UTR+909 and 10e.3′UTR+1093 are located at nucleotides 2149 and 2333, respectively, of SEQ ID NO: 482.

[0975] Other known SNPs in the LIPA gene contemplated for use in the various diagnostic and screening methods, as well as kits and solid supports, provided herein include the NCBI SNPs set forth in Table E, which are referenced by their respective locations in FIG. 5 and in SEQ ID NO: 467.

TABLE E
LIPA NCBI Polymorphisms

| | | POSITION IN |
|---|---|---|
| NCBI SNP ID NO. | POLYMORPHISM | SEQ ID NO:467 |
| rs928415 | C/T | 7219 |
| rs1930052 | A/G | 8242 |
| rs1332329 | G/T | 10114 |
| rs1412444 | A/G | 10606 |
| rs1320496 | A/G | 10688 |
| rs1412445 | A/G | 10729 |
| rs869820 | C/T | 11559 |
| rs1106211 | A/G | 12031 |
| rs1029074 | C/T | 14497 |
| rs1029073 | A/G | 14729 |
| rs1930053 | C/T | 21145 |
| rs951647 | C/G | 21329 |
| rs951648 | A/G | 21404 |
| rs885561 | A/G | 21429 |
| rs1041388 | C/T | 22246 |
| rs1041389 | A/G | 22354 |
| rs1041390 | C/T | 22621 |
| rs914606 | C/T | 23802 |
| rs2071510 | A/C | 25969 |

[0976] Based on the methods disclosed herein, along with other used in the art, one of ordinary skill would be able to determine polymorphisms that are useful for diagnostic and/or therapeutic discovery purposes for neurodegenerative diseases and to determine the affect of the polymorphisms on the uPA, SNCG, IDE, KNSL1, TNFRSF6 or LIPA gene and/or protein using the methods disclosed herein. Any identified polymorphisms, including SNPS, that are not herein denoted, are considered potentially useful in the described methods and kits. Also, one of ordinary skill in the art would be able to identify additional polymorphic regions of the uPA, SNCG, IDE, KNSL1, TNFRSF6 or LIPA gene by sequencing additional samples and comparing the sequences.

### EXAMPLE 4

[0977] Sequencing of the uPA Gene

[0978] Genomic sequences were downloaded from the Human Genome Project public database. The exon-intron structure of each candidate gene was determined by querying the NCBI BLASTN search and alignment program with one or more cDNA sequences encoding the gene (Altschul et al. (1997) Nucleic Acids Res. 25:3389-3402). Based on this information, primers were designed to amplify regions of interest from genomic DNA and sequence them on both strands. These regions consisted of: (1) approximately 1 kb of 5′ flanking sequence 5′ to the beginning of exon 1, containing the putative promoter; (2) all exons plus 50-200 bp 5′ and 3′ flanking sequence for each one; and (3) ˜700 bp 3′ to the translation stop codon. When the final exon contained a 3′UTR >700 nt long, the region >700 nt 3′ to the stop codon was not amplified.

[0979] The genomic DNA samples were obtained from NIMH as described in Example 1. The desired regions were amplified by PCR using 30 ng each genomic DNA with the HotStarTaq Master Mix Kit (QIAGEN, Inc., Valencia, Calif.) and a final concentration of 1 μm each of specific PCR primers (see Tables below) according to the manufacturer's protocol. The annealing temperature for different primers was varied as required. The reactions were purified using the QIAquick 96 PCR Purification Kit (QIAGEN, Inc., Valencia, Calif.) according to the manufacturer's protocol. PCR product yields were quantitated using the PicoGreen dsDNA Quantitation Kit (Molecular Probes, Inc., Eugene, Oreg.) according to the manufacturer's protocol. Sequencing reactions were performed with ABI PRISM BigDye™ Terminators v3.0 Cycle Sequencing Kit (Applied Biosystems, Foster City, Calif.), using a modification of the manufacturer's protocol as follows. For each template and primer combination (see Tables, below), a mixture of 2 μl BigDye™ Mix, 4 μl 5× Sequencing Buffer, 8 μl H₂O, 2 μl primer (1.6 pmol/μl), and 4 μl PCR product (3 ng/μl) was subjected to 30 cycles of 10 s at 96° C., 5 s at 50° C. and 4 min at 60° C. The reactions were purified on a Centri-Sep 96 plate (Princeton Separations, Adelphia, N.J.) according to the manufacturer's protocol and analyzed in an ABI 3700 Automated DNA Sequencer (Applied Biosystems, Foster City, Calif.). Sequence data for each region in all samples were aligned using Sequencher software (GeneCodes Corp., Ann Arbor) and manually evaluated for the presence of polymorphisms.

[0980] The nucleotide sequence of the uPA gene in the Top10 set+E16 was determined. The Top10 set+E16 was derived from 26 genomic DNA samples from families showing the highest combined LOD scores for linkage with LOAD at 6 markers (D10S564, D10S583, D10S1710, D10S566, D10S1671 and D10S1741). A second set of 24 genomic DNA samples was also sequenced. This set contains 10 families with the best combined LOD scores to marker D10S1432 (92 cM), D10S1218 (5.2 cM), D10S1225 (80.8 cM), D10S1221 (75.6 cM), and D10S1208 (63.0 cM). Both sets contained individuals affected with AD and unaffected individuals.

[0981] Primers were designed to amplify regions of interest from genomic DNA and to sequence those regions on both strands. Amplification and sequencing primers are shown in Table 11.

TABLE 11

Primers for uPA gene Genomic PCR and Sequencing

| | | | | |
|---|---|---|---|---|
| REGION | PRIMER NAME | SEQUENCE (5′→3′) | PURPOSE | SEQ ID NO: |

| | | | | |
|---|---|---|---|---|
| Promoter | B-13 Pma p01 | CTCCAGAACCTCCACAGTTAGAAC | PCR, sequencing | 509 |
| Promoter | B-13 Pma p02 | CGAGAGGCTTGTAAATTCTCCGTG | PCR, sequencing | 510 |
| Promoter | B-13 Pma 5s | CGGCTTTGTTCCATCCACTG | sequencing | 511 |
| Promoter | B-13 Pma 6s | AGAAAAACCCCTGCCTGTAG | sequencing | 512 |
| Promoter | B-13 Pmb p01 | CAAGGGGGTCTGAGGCAGTCTTAG | PCR, sequencing | 513 |
| Promoter | B-13 Pmb p02 | GGAGCTGGGGCCGCCGCGCATCCG | PCR, sequencing | 514 |
| Promoter | B-13 Pmb 5s | TCCTCAGTCCAGACGCTGTT | sequencing | 515 |
| Promoter | B-13 Pmb 6s | CAGCGGAGGGGACCCAACAG | sequencing | 516 |
| Exon 01 | B-13 f01 p01 | GATTCCTCAGTCCAGACGCTGTTG | PCR, sequencing | 517 |
| Exon 01 | B-13 f01 p02 | GGGCTCTCATGGTGGCGAGGTCGG | PCR, sequencing | 518 |
| Exon 02 | B-13 f02 p01 | GTGAGTGCCGCGGTCCTGAGATGC | PCR, sequencing | 519 |
| Exon 02 | B-13 f02 p02 | CCCAAGCAAGCTTCATCTACCAGA | PCR, sequencing | 520 |
| Exon 02 | B-13 f02 5s | TTGCAGAGCCGCCGTCTAGC | sequencing | 521 |
| Exon 03 | B-13 f03 p01 | GGAGGAAGAGGCCGCCGGGACT | PCR, sequencing | 522 |
| Exon 03 | B-13 f03 p02 | TTTGTGTGGCCACTGTTTCGTG | PCR, sequencing | 523 |
| Exon 03 | B-13 f03 5s | CATCCCCTCCCTGCCCTCTG | sequencing | 524 |
| Exon 03 | B-13 f03 6s | GAGGGCAGGGAGGGGATGTC | sequencing | 525 |
| Exon 04 | B-13 f04 p01 | CCAGCCTGGACAACATGGTGTA | PCR, sequencing | 526 |
| Exon 04 | B-13 f04 p02 | ACTCTTGGACAAGCGGCTTTAG | PCR, sequencing | 527 |
| Exon 04 | B-13 f04 5s | GCCCTGCCTGCCCTGGAACT | sequencing | 528 |
| Exon 04 | B-13 f04 6s | GGTGTCAGTGCTGGCCTTTC | sequencing | 529 |
| Exon 05 | B-13 f05 p01 | TCTGCCACTGTCCTTGAGCAAACG | PCR, sequencing | 530 |
| Exon 05 | B-13 f05 p02 | AATTCTCCCCCAATAATCTTAAAG | PCR, sequencing | 531 |
| Exon 05 | B-13 f05 5s | CTAAAGCCGCTTGTCCAAGA | sequencing | 532 |
| Exon 05 | B-13 f05 6s | CTCTTGGACAAGCGGCTTTA | sequencing | 533 |
| Exon 06 | B-13 f06 p01 | GAGAAGTGCGGCCTCTGGTTGAGT | PCR, sequencing | 534 |
| Exon 06 | B-13 f06 p02 | TAGTCCTCCTTCTTTGGGTAATCA | PCR, sequencing | 535 |
| Exon 06 | B-13 f06 5s | CTCCTACCTGCCTCCCTAAG | sequencing | 536 |
| Exon 06 | B-13 f06 6s | AGGGCTGGTTCTCGATGGTG | sequencing | 537 |
| Exon 07 | B-13 f07 p01 | GGCCCTGGGTTTCTCCTCTTCGAC | PCR, sequencing | 538 |
| Exon 07 | B-13 f07 p02 | AGGCTCCATTCTCCAAGTTCTATA | PCR, sequencing | 539 |
| Exon 07 | B-13 f07 5s | CTGACACGCTTGCTCACCAC | sequencing | 540 |
| Exon 07 | B-13 f07 6s | CACTCTCCCCAAGCCATTAT | sequencing | 541 |
| Exon 08 | B-13 f08 p01 | ATGGATTCCAGCCTAACTACCTCA | PCR, sequencing | 542 |
| Exon 08 | B-13 f08 p02 | GTCTGCCAGAGAGGGGAACCATAA | PCR, sequencing | 543 |
| Exon 08 | B-13 f08 5s | CCTGCCCTCGATGTATAACG | sequencing | 544 |
| Exon 08 | B-13 f08 6s | AAACTGGGGATCGTTATACA | sequencing | 545 |
| Exon 09 | B-13 f09 p01 | GAAGAGTGTTGTTTAGGGAGCGAT | PCR, sequencing | 546 |
| Exon 09 | B-13 f09 p02 | ACACCCTGGGCACTGAGTTACATT | PCR, sequencing | 547 |
| Exon 09 | B-13 f09 5s | TTCCTGCCAGGTGAGTGTTC | sequencing | 548 |
| Exon 09 | B-13 f09 6s | TCTGGGGAGATATGGAAGAG | sequencing | 549 |
| Exon 10 | B-13 f10 p01 | CTAATCAGGAGGCTGAGACATGGG | PCR, sequencing | 550 |
| Exon 10 | B-13 f10 p02 | CTTCAGTCCAGAAAAAGACAAGTT | PCR, sequencing | 551 |
| Exon 10 | B-13 f10 5s | GCCGTGGATGTGCCCTGAAG | sequencing | 552 |
| Exon 10 | B-13 f10 6s | TCGTGTAGACGCCTGGCTTG | sequencing | 553 |
| Exon 11 | B-13 f11 p01 | CCACCCGCTTTCTTGCTGGTTGTC | PCR, sequencing | 554 |
| Exon 11 | B-13 f11 p02 | TACCTCCCAAAGCTCCATTAAGTC | PCR, sequencing | 555 |
| Exon 11 | B-13 f11 5s | CGACGGTGGGCATTTGTGAG | sequencing | 556 |
| Exon 11 | B-13 f11 6s | GACCCAAGAGGCCCCAGGAG | sequencing | 557 |
| Exon 11 | B-13 f11 8s | CCTCACAAATGCCCACCGTC | sequencing | 558 |

[0982] Several polymorphic regions have been identified in the human uPA gene. Table 12 shows the polymorphic regions that were identified, including those previously identified (set forth as yes in public data column), the position in SEQ ID NO: 559 and the nucleotide change detected relative to the reference sequence.

TABLE 12
Urokinase Plasminogen Activator Gene Polymorphic Regions

| POLY- | | POSITION | |
|---|---|---|---|
| MORPHISM | NUCLEOTIDE | IN SEQ | PUBLIC |
| NAME | CHANGE DETECTED | ID NO:559 | DATABASE |
| us-992 | A→C | 9 | Yes |
| | | | rs2227553 |
| US-600 | G→A | 401 | No |
| US-538 | Deletion of G | 464 | Yes |
| US-487 | C→T | 515 | No |
| US-254 | G→T | 748 | No |
| 1i.D + 186 | T→G | 1229 | Yes |
| (US-152) | | | rs1916341 |
| 2e.5′utr-25 | C→T | 1356 | Yes |
| | | | rs2227579 |
| 2i.A − 114 | T→C | 1752 | No |
| 3i.D + 49 | G→A | 1942 | Yes |
| | | | rs222758 |
| 4e.CDS + 173 | G→A | 2127 | Yes |
| 4i.D + 396 | G→A | 2543 | Yes |
| | | | rs2227560 |
| 5i.D + 105 | G→A | 3029 | Yes |
| | | | rs2227562 |
| 6e.CDS + 422 | C→T | 3169 | Yes |
| | | | rs2228228, |
| | | | rs2227564 |
| 7i.A − 7 | T→C | 3799 | Yes |
| | | | rs2227566 |
| 8e.CDS + 822 | C→T | 3947 | Yes |
| | | | rs2228227, |
| | | | rs2227568 |
| 9i.D + 66 | C→T | 4808 | Yes |
| | | | rs2227571 |
| 10i.D + 62 | T→C | 5287 | Yes |
| | | | rs2227583 |
| 11e.3utr + 141 | T→C | 6532 | Yes |
| | | | rs4065 |

[0983] TABLE 12-B
Urokinase Plasminogen Activator Gene Polymorphic Regions

| POLY- | | POSITION | |
|---|---|---|---|
| MORPHISM | NUCLEOTIDE | IN SEQ | PUBLIC |
| NAME | CHANGE DETECTED | ID NO:563 | DATABASE |
| us-1920 | T→C | 79 | Yes |
| us-1907 | C deletion | 93 | No |
| us-1745 | G→T | 256 | Yes |
| | | | rs2227552 |
| us-1616 | C→T | 385 | Yes |
| | | | rs2227552 |
| us-1287 | GT deletion | 714-715 | No |

[0984] The polymorphism at position 256 in SEQ ID NO: 563 corresponds to the polymorphism at position 82 of SEQ ID NO: 564.

[0985] Upstream Sequence

[0986] Several polymorphisms were discovered upstream of the transcription start site of the uPA gene; US-600 (600 nucleotides upstream), US-538 (538 nucleotides upstream), US-487 (487 nucleotides upstream) and US-254 (254 nucleotides upstream). These polymorphisms are located in putative promoter or enhancer regions of the uPA gene and as such a nucleotide change may affect the expression of the uPA gene.

[0987] Intervening Sequences

[0988] 1i.D+186 is located in the intron between exon 1 and exon 2, 186 nucleotides 3′ of the splice donor site; 2i.A-114 is located in the intron between exon 2 and exon 3, 114 nucleotides 5′ of the splice acceptor site; 3i.D+49 is located in the intron between exon 3 and exon 4, 49 nucleotides 3′ of the splice donor site; 4i.D+396 is located in the intron between exon 4 and exon 5, 396 nucleotides 3′ of the splice donor site; 5i.D+105 is located in the intron between exon 5 and exon 6, 105 nucleotides 3′ of the splice donor site; 7i.A-7 is located in the intron between exon 7 and exon 8, 7 nucleotides 5′ of the splice acceptor site; 9i.D+66 is located in the intron between exon 9 and exon 10, 66 nucleotides 3′ of the splice donor site and 10i.D+62 is located in the intron between exon 10 and exon 11, 62 nucleotides 3′ of the splice donor site. These polymorphisms may affect splicing of the uPA RNA.

[0989] Coding Sequence

[0990] 4e.cds+173 is located in the fourth exon of the uPA gene in the coding region and results in an amino acid change at residue 58 from glycine to glutamine. 6e.cds+422 is located in the sixth exon of the uPA gene in the coding region and results in an amino acid change at residue 140 from proline to leucine. 8e.cds+822 is located in the eigth exon of the uPA gene in the coding region and results in no change of the amino acid residue at position 274 of the protein. Genbank Accession number NM_{—}002658.1 denotes the sequence for a uPA gene cDNA (SEQ ID NO: 561). 4e.cds+173, 6e.cds+422 and 8e.cds+822 are represented in SEQ ID NO: 561 at nucleotide positions corresponding to positions 249, 498 and 898, respectively.

[0991] 5′ UTR Sequence

[0992] 2e.5′utr-25 is located in the 5′ untranslated sequence of the uPA gene, 25 nucleotides 5′ of the start codon and may affect, among other processes translation initiation and RNA stability. 2e.5′utr-25 is represented in SEQ ID NO: 561 at a nucleotide position corresponding to position 49.

[0993] 3′ UTR Sequence

[0994] 11e.3utr+141 is located in the 3′ untranslated sequence of the uPA gene, 141 nucleotides 3′ of the stop codon, and may affect, among other processes, stability, RNA processing and/or polyadenylation of the uPA gene transcript. 11e.3utr+141 is represented in SEQ ID NO: 561 at a nucleotide position corresponding to position 1512.

[0995] Other known polymorphisms in the uPA gene contemplated for use in the various diagnostic and screening methods, as well as kits and solid supports, provided herein include the NCBI polymorphisms set forth in Table F, which are referenced by their respective locations in FIG. 8 and in SEQ ID NO: 559.

TABLE F
uPA gene NCBI Polymorphisms

| | | Position in |
|---|---|---|
| NCBI SNP ID No. | Polymorphism | SEQ ID NO:559 |
| rs2227554 | A/G | 178 |
| rs2227555 | C/A | 1363 |
| rs2227580 | G/T | 1423 |
| rs1916340 | C/A | 1465 |
| rs2227556 | C/T | 1540 |
| rs2227557 | C/T | 2297 |
| rs2227558 | T/G | 2445 |
| rs2227561 | G/A | 2653 |
| rs2227563 | G/A | 3080 |
| rs1050120 | C/G | 3546 |
| rs2227565 | C/T | 3664 |
| rs2229301, | A/C | 3816 |
| rs2227567 | | |
| rs2227582 | T/C | 4320 |
| rs2227569 | G/A | 4369 |
| rs2227570 | C/A | 4399 |
| rs2227572 | G/A | 4851 |
| rs1050122 | G/A | 5186 |
| rs1130957 | G/A | 5204 |
| rs2227573 | C/G | 5787 |
| rs1050124 | C/G | 6519 |
| rs1804874 | G/T | 6909 |
| rs2227574 | Deletion of G | 7235 |
| rs2227584 | C/T | 7848 |
| rs2227575 | A/C | 7908 |

[0996] Based on the methods disclosed herein, along with other used in the art, one of ordinary skill would be able to determine polymorphisms that are useful for diagnostic and/or therapeutic discovery purposes for neurodegenerative diseases and to determine the affect of the polymorphisms on the uPA gene and/or protein using the methods disclosed herein. Any identified polymorphisms, including SNPS, that are not herein denoted, are considered potentially useful in the described methods and kits. Also, one of ordinary skill in the art would be able to identify additional polymorphic regions of the uPA gene by sequencing additional samples and comparing the sequences.

[0997] Since modifications will be apparent to those of skill in the art, it is intended this invention be limited only by the scope of the appended claims.

[0998] Summary Of Sequence Listing

[0999] SEQ ID NOs: 1-71 correspond to both amplification and sequencing primers for the SNCG gene as set forth in Table 1.

[1000] SEQ ID NO: 72 is human genomic DNA corresponding to GenBank Accession No. AF037207.1 having the SNCG gene (a.k.a. human persyn) therein plus an additional 175 nucleotides of 3′ flanking sequence corresponding to the reverse complement of nucleotides 235901-236075 of GenBank Accession No. AC025039.4.

[1001] SEQ ID NO: 73 is identical to SEQ ID NO: 72, except that polymorphic regions are indicated throughout.

[1002] SEQ ID NOs:74-185 correspond to both amplification and sequencing primers for the IDE gene as set forth in Table 3.

[1003] SEQ ID NO: 186 is human genomic DNA corresponding to the reverse complement of NCBI Accession No. AL356128.15 having the IDE gene therein.

[1004] SEQ ID NO: 187 is identical to SEQ ID NO: 186, except that polymorphic regions are indicated throughout.

[1005] SEQ ID NOs: 188-346 correspond to both amplification and sequencing primers for the KNSL1 gene as set forth in Table 5.

[1006] SEQ ID NO: 347 is human genomic DNA corresponding to the reverse complement of a 63,834 nucleotide portion of NCBI Accession No. NT_{—}008769.1 starting at nucleotide 1,669,312 and ending at nucleotide 1,733,136, having the KNSL1 gene therein.

[1007] SEQ ID NO: 348 is identical to SEQ ID NO: 347, except that polymorphic regions are indicated throughout.

[1008] SEQ ID NOs: 349-401 correspond to both amplification and sequencing primers for the TNFRSF6 gene as set forth in Table 7.

[1009] SEQ ID NO: 402 is human genomic DNA corresponding to the reverse complement of a 28,118 nucleotide portion of NCBI Accession No. AL157394.11 starting at nucleotide 17,215 and ending at nucleotide 45,332, having the TNFRSF6 gene therein.

[1010] SEQ ID NO: 403 is identical to SEQ ID NO: 402, except that polymorphic regions are indicated throughout.

[1011] SEQ ID NOs: 404-466 correspond to both amplification and sequencing primers for the LIPA gene as set forth in Table 9.

[1012] SEQ ID NO: 467 is human genomic DNA corresponding to the 40,178 nucleotide portion of NCBI Accession No. NT_{—}008679.5 starting at nucleotide 6,017,146 and ending at 6,057,323, having the LIPA gene therein.

[1013] SEQ ID NO: 468 is identical to SEQ ID NO: 467, except that polymorphic regions are indicated throughout.

[1014] SEQ ID NO: 469 corresponds to a cDNA provided herein encoding a human SNCG protein.

[1015] SEQ ID NO: 470 corresponds to a cDNA provided herein encoding a human IDE protein.

[1016] SEQ ID NOs: 471, 473 and 475 correspond to cDNAs provided herein encoding human KNSL1 proteins.

[1017] SEQ ID NOs: 472, 474 and 476 correspond to the human KNSL1 proteins provided herein.

[1018] SEQ ID NOs: 477-481 correspond to cDNAs provided herein encoding a human TNFRSF6 protein.

[1019] SEQ ID NO: 482 corresponds to a cDNA provided herein encoding a human LIPA protein.

[1020] SEQ ID NO: 483 corresponds to the human SNCG genomic sequence (GenBank accession AF04431 1) including an additional 909 nucleotides of 5′ flanking sequence obtained from a BLAST search of the NCBI human EST database.

[1021] SEQ ID NO: 484 corresponds to the genomic DNA sequence corresponding to the IDE/KNSL1 genes taken from hg12 chromosome build 10:93094801 to 93296900 (see also FIG. 6) available from “www.genome.ucsc.edu”.

[1022] SEQ ID NOs: 485-508 correspond to primers used for testing the particular IDE and KNSL1 polymorphic regions as set forth in Example 3 and FIG. 7.

[1023] SEQ ID NOs: 509-558 correspond to amplification and sequencing primers for the uPA gene as set forth in Table 11.

[1024] SEQ ID NO: 559 is human genomic DNA sequence corresponding to nucleotides 827 to 9141 of Genbank Accession No. AF377330 having the uPA gene therein. The sequence shown is that of the sense strand of the genomic DNA (see FIG. 8).

[1025] SEQ ID NO: 560 is SEQ ID NO: 559, except that polymorphic regions are indicated throughout.

[1026] SEQ ID NO: 561 is a cDNA sequence corresponding to Genbank Accession No. NM_{—}002658 encoding a human uPA protein. Polymorphic regions are indicated throughout (see FIG. 9).

[1027] SEQ ID NO: 562 is an amino acid sequence for a human uPA protein.

[1028] SEQ ID NO: 563 is the reverse complement of the nucleotides 74623356-74624256 on Chromosome 10 from the Human Genome Draft build hg12 (see FIG. 10), which is available at “www.genome.ucsc.edu”.

[1029] SEQ ID NO: 564 is a human genomic DNA sequence corresponding to Genbank Accession No. AF377330 having the uPA gene therein. The polymorphism as position 82 in SEQ ID NO: 564 corresponds to the polymorphism at position 256 in SEQ ID NO: 563 and Table 12-B.

[1030] Since modifications will be apparent to those of skill in the art, it is intended this invention be limited only by the scope of the appended claims.

What is claimed:

1. A method for determining a predisposition for or the occurrence of neurodegenerative disease in a subject, comprising:
the step of detecting in a target nucleic acid obtained from the subject the presence or absence of an allelic variant of one or more polymorphic regions of one or more genes selected from the group consisting of uPA, SNCG, IDE, KNSL1, LIPA and TNFRSF6, wherein the presence of at least one of said allelic variant of one or more polymorphic regions is indicative of a predisposition for or the occurrence of neurodegenerative disease.

2. The method of claim 1, wherein the neurodegenerative disease is Alzheimer's disease.

3. The method of claim 1, wherein the gene is SNCG.

4. The method of claim 1, wherein the gene is IDE.

5. The method of claim 1, wherein the gene is KNSL1.

6. The method of claim 1, wherein the gene is LIPA.

7. The method of claim 1, wherein the gene is TNFRSF6.

8. The method of claim 3, wherein the one or more polymorphic regions of the SNCG gene occurs at a nucleotide position corresponding to a nucleotide position selected from the group of nucleotide positions of SEQ ID NO: 73 consisting of 560, 590, 617, 645, 915, 987, 1723, 1943, 1950, 3151, 3178, 3189, 3284, 3779, 4156, 4276, 4311, 4552, 4976, 4995, 5019, 5025, 5112, 5136, 5517, 2533, 3371, 4627, 4727, 4813 and 5200, or the complement thereof.

9. The method of claim 4, wherein the one or more polymorphic regions of the IDE gene occurs at a nucleotide position corresponding to a nucleotide position selected from the group of nucleotide positions of SEQ ID NO: 187 consisting of 2456, 3279, 3407, 42943, 62498, 69586, 107395, 112114, and 116662, or the complement thereof; or of SEQ ID NO: 484 consisting of 820, 7066, 11758, 21270, 22225, 29294, 33452, 33708, 36982, 54862, 77786, 80594, 84792, 84997, 86682, 86857, 88511, 90437, 90593, 91650, 91870, 91878, 92011, 93618, 94344, 94714, 95671, 96324, 97302, 97370, 98253, 98276, 98385, 98646, 98814, 99597, 100378, 101029, 101265, 102465, 103289, 103967, 105793, 106076, 106453, 106600, 106995, 107851, 108434, 109096, 109399, 109483, 110870, 111189, 111972, 112627, 112629, 112631, 113407, 114444, 114482, 115473, 116681, 117226, 117600, 117802, 118223, 120011, 122260, 123165, 123424, 124352, 124501, 124692, 125113, 125159, 126568, 127166, 127598, 127600, 127609, 127614, 127623, 127662, 128053, 128261, 128289, 128291, 128393, 129444, or the complement thereof.

10. The method of claim 5, wherein the one or more polymorphic regions of the KNSL1 gene occurs at a nucleotide position corresponding to a nucleotide position selected from the group of nucleotide positions of SEQ ID NO: 348 consisting of 300, 1152, 14235, 15104, 20815, 35719, 36738-36739, 41015, 42125, 45083, 45887, 56706, 56887, 58524, 62661 and 63802, or the complement thereof; or of SEQ ID NO: 484 consisting of 130876, 131378, 131616, 131620, 131688, 131998, 132004, 132370, 132697, 132968, 133355, 133806, 134030, 134291, 134661, 137087, 137142, 138396, 140665, 140736, 141173, 142056, 142777, 143025, 143729, 144484, 146181, 147051, 147322, 147707, 147842, 148080, 149026, 149044, 149389, 150003, 150384, 150454, 150686, 151343, 151961, 152119, 153791, 154328, 154513, 154639, 155049, 155114, 158040, 158895, 191284, 192272, 192698, 193706, or the complement thereof.

11. The method of claim 6, wherein the one or more polymorphic regions of the LIPA gene occurs at a nucleotide position corresponding to a nucleotide position selected from the group of nucleotide positions of SEQ ID NO: 468 consisting of 1197, 1307-1309, 1841, 1852, 2075, 6063, 6173, 6194, 7820, 25283, 28453-28465, 28543, 28746, 29904, 37861, 39834, and 40018, or the complement thereof.

12. The method of claim 7, wherein the one or more polymorphic regions of the TNFRSF6 gene occurs at a nucleotide position corresponding to a nucleotide position selected from the group of nucleotide positions of SEQ ID NO: 403 consisting of 1530, 1550, 14525, 14714, 18982, 19069, 20412, 20552, 23199, 23416, 24890, 26359, 1926, 2269, 18934, 19227 and 22026, or the complement thereof.

13. The method of claim 8, wherein the nucleotide at position 560 is G or A, at position 590 is A or C, at position 617 is C or T, at position 645 is G or A, at position 915 is T or G, at position 987 is C or A, at position 1723 is A or G, at position 1943 is G or C, at position 1950 is G or A, at position 3151 is A or G, at position 3178 is T or C, at position 3189 is T or C, at position 3284 is G or A, at position 3779 is T or position 3779 is deleted, at position 4156 corresponds to a single nucleotide G that is either inserted or not inserted, at position 4276 is T or A, at position 4311 is C or T, at position 4552 is T or A, at position 4976 is C or position 4976 is deleted, at position 4995 is C or G, at position 5019 is C or T, at position 5025 is C or A, at position 5112 is T or A, at position 5136 is T or A, at position 5517 is T or C, at position 2533 is T or G, at position 3371 is A or C, at position 4627 is T or G, at position 4727 is A or G, at position 4813 is A or C, and at position 5200 is G or C.

14. The method of claim 9, wherein the nucleotide in SEQ ID NO: 187 at position 2456 is T or G, at position 3279 is T or C, at position 3407 is C or T, at position 42943 is T or C, at position 62498 is T or C, at position 69586 is T or C, at position 107395 is G or A, at position 112114 is G or A, and at position 116662 is T or A; and wherein the complementary nucleotide in SEQ ID NO: 484 at position 820 is A or T, at position 7066 is A or G, at position 11758 is T or C, at position 21270 is T or G, at position 22225 is A or T, at position 29294 is C or T, at position 33452 is G or T, at position 33708 is G or A, at position 36982 is C or T, at position 54862 is A or G, at position 77786 is C or A, at position 80594 is G or A, at position 84792 is T or C, at position 84997 is G or T, at position 86682 is C or T, at position 86857 is T or A, at position 88511 is A or G, at position 90437 is G or T, at position 90593 is G or A, at position 91650 is T or C, at position 91870 is G or A, at position 91878 is G or A, at position 92011 is C or T, at position 93618 is T or C, at position 94344 is C or T, at position 94714 is A or G, at position 95671 is A or G, at position 96324 is A or G, at position 97302 is G or A, at position 97370 is G or A, at position 98253 is T or C, at position 98276 is C or T, at position 98385 is A or G, at position 98646 is T or A, at position 98814 is G or A, at position 99597 is C or T, at position 100378 is T or C, at position 101029 is G or A, at position 101265 is C or T, at position 102465 is C or G, at position 103289 is T or G, at position 103967 is C or T, at position 105793 is A or G, at position 106076 is G or T, at position 106453 is C or T, at position 106600 is A or G, at position 106995 is G or A, at position 107851 is C or T, at position 108434 is G or C, at position 109096 is C or T, at position 109399 is C or T, at position 109483 is T or G, at position 110870 is G or A, at position 111189 is A or G, at position 111972 is G or A, at position 112627 is A or T, at position 112629 is A or T, at position 112631 is T or A, at position 113407 is C or G, at position 114444 is C or G, at position 114482 is G or C, at position 115473 is C or position 115473 is deleted, at position 116681 is G or T, at position 117226 is A or T, at position 117600 is A or G, at position 117802 is C or T, at position 118223 is G or C, at position 120011 is C or T, at position 122260 is A or G, at position 123165 is A or G, at position 123424 is G or A, at position 124352 is A or G, at position 124501 is C or T, at position 124692 is A or G, at position 125113 is T or A, at position 125159 is G or A, at position 126568 is G or C, at position 127166 is C or G, at position 127598 is T or C, at position 127600 is T or C, at position 127609 is T or C, at position 127614 is T or C, at position 127623 is T or C, at position 127662 is G or A, at position 128053 is G or A, at position 128261 is a repeat of -TAAA- occurring 6, 7, or 8 times beginning at position 128261, at position 128289 is A or T, at position 128291 is T or G, at position 128393 is T or G, at position 129444 is C or T.

15. The method of claim 10, wherein the nucleotide in SEQ ID NO: 348 at position 300 corresponds to a dinucleotide -CA- that is either inserted or not inserted beginning at position 300, at position 1152 is G or T, at position 14235 corresponds to a single nucleotide T that is either inserted or not inserted, at position 15104 is A or G, at position 20815 is T or C, at position 35719 is T or C, at positions 36738-36739 is a dinucleotide corresponding to CA or AC, at position 41015 corresponds to the oligonucleotide -AATTT- that is either inserted or not inserted beginning at position 41015, at position 42125 is T or G, at position 45083 is C or T, at position 45887 is G or C, at position 56706 is C or T, at position 56887 is A or G, at position 58524 is C or T, at position 62661 is C or T, and at position 63802 is A or C; and wherein thenucleotide in SEQ ID NO: 484 at position 130876 is T o 131378 is G or A, at position 131616 is G or A, at position 131620 is G or A, at position 131688 is T or G, at positions 131998-131203 are -CTTTTC- or positions 131998-131203 are deleted, at position 132004 is either a 9, 16, 21, 26, or 29 base pair poly-T repeat beginning at nucleotide 132004, at position 132370 is A or G, at position 132697 is A or G, at position 132968 is C or T, at position 133355 is either a 6, 7 or 8 base pair poly-T repeat beginning at nucleotide 133355, at position 133806 is T or G, at position 134030 is G or A, at position 134291 is A or G, at position 134661 is G or A, at position 137087 is A or G, at position 137142 is G or A, at position 138396 is C or T, at position 140665 is T or G, at position 140736 is A or G, at position 141173 is A or G, at position 142056 is T or C, at position 142777 corresponds to a dinucleotide -AG- that is either inserted or not inserted beginning at position 142777, at position 143025 is G or T, at position 143729 is C or A, at position 144484 is T or A, at position 146181 is T or A, at position 147051 is g or A, at position 147322 is C or T, at position 147707 is G or T, at positions 147842-147845 are -AGTT- or positions 147842-147845 are deleted, at position 148080 is C or T, at position 149026 is either a 17, 18, 19 or 22 base pair -AC- repeat beginning at nucleotide 149026, at position 149044 is either a 22, 24, 28, 30, 32 or 36 base pair -GT- repeat beginning at nucleotide 149044, at position 149389 is A or G, at position 150003 is G or A, at position 150384 is G or T, at position 150454 is C or T, at position 150686 is G or T, at position 151343 is C or T, at position 151961 is C or T, at position 152119 is C or T, at position 153791 is C or G, at position 154328 is A or T, at position 154513 is C or A, at position 154639 is G or A, at position 155049 is T or C, at position 155114 is T or C, at position 158040 is C or A, at position 158895 is G or A, at position 191284 is C or T, at position 192272 is C or T, at position 192698 is A or T, at position 193706 is T or A.

16. The method of claim 11, wherein the nucleotide at position 1197 is C or G, at positions 1307-1309 are ATC or positions 1307-1309 are deleted, at position 1841 is A or C, at position 1852 is G or A, at position 2075 is G or A, at position 6063 is G or T, at position 6173 is A or C, at position 6194 is G or A, at position 7820 is C or G, at position 25283 is G or C, at positions 28453-28465 are -TCCGCGAGAGGGC- or positions 28453-28465 are deleted, at position 28543 is C or T, at position 28746 is A or C, at position 29904 is G or A, at position 37861 is C or T, at position 39834 is T or A, and at position 40018 is C or T.

17. The method of claim 12, wherein the nucleotide at position 1530 is T or C, at position 1550 is A or G, at position 14525 is G or A, at position 14714 is C or T, at position 18982 is G or C, at position 19069 is A or G, at position 20412 is A or G, at position 20552 is A or G, at position 23199 is G or A, at position 23416 is T or C, at position 24890 is A or G, at position 26359 is A or T, at position 1926 is G or A, at position 2269 is G or A, at position 18934 is C or T, at position 19227 is C or T, and at position 22026 is C or G.

18. The method of claim 1, further comprising detecting the presence or absence of an allelic variant of at least one polymorphic region of at least two different genes associated with neurodegenerative disease, wherein the presence of the allelic variants of two or more genes is indicative of a predisposition for or occurrence of neurodegenerative disease.

19. The method of claim 18, wherein one gene of the two different genes is APOE 4.

20. The method of claim 1, wherein the detecting step is selected from the group consisting of sequencing, single-stranded conformation polymorphism, allele specific hybridization, size analysis, primer specific extension, oligonucleotide ligation assay and 5′ nuclease digestion.

21. An isolated nucleic acid molecule, comprising at least 16, 18, 20, 22, 24, 26, 28 or at least 30 contiguous nucleotides of a SNCG allele; wherein the contiguous nucleotides include a sequence of 5 contiguous nucleotides of SEQ ID NO: 72 selected from the group of nucleotide positions corresponding to one or more of:
position 613 to position 621, except that the nucleotide at position 617 is replaced with a nucleotide selected from the group consisting of G, T and A;
position 641 to position 649, except that the nucleotide at position 645 is replaced with a nucleotide selected from the group consisting of C, T and A;
position 911 to position 919, except that the nucleotide at position 915 is replaced with a nucleotide selected from the group consisting of G, C and A;
position 983 to position 991, except that the nucleotide at position 987 is replaced with a nucleotide selected from the group consisting of G, T and A;
position 1946 to position 1954, except that the nucleotide at position 1950 is replaced with a nucleotide selected from the group consisting of C, T and A;
position 3147 to position 3155, except that the nucleotide at position 3151 is replaced with a nucleotide selected from the group consisting of G, C and T;
position 3174 to position 3182, except that the nucleotide at position 3178 is replaced with a nucleotide selected from the group consisting of G, C and A;
position 3185 to position 3193, except that the nucleotide at position 3189 is replaced with a nucleotide selected from the group consisting of G, C and A;
position 3280 to position 3288, except that the nucleotide at position 3284 is replaced with a nucleotide selected from the group consisting of T, C and A;
position 3775 to position 3783, except that the nucleotide at position 3779 is replaced with a nucleotide selected from the group consisting of G, C and A;
position 4152 to position 4160, except that between nucleotides at positions 4155 and 4156 a G is inserted;
position 4272 to position 4280, except that the nucleotide at position 4276 is replaced with a nucleotide selected from the group consisting of G, C and A;
position 4307 to position 4315, except that the nucleotide at position 4311 is replaced with a nucleotide selected from the group consisting of G, T and A;
position 4548 to position 4556, except that the nucleotide at position 4552 is replaced with a nucleotide selected from the group consisting of G, C and A;
position 4972 to position 4980, except that the C nucleotide at position 4976 is deleted;
position 4991 to position 4999, except that the nucleotide at position 4995 is replaced with a nucleotide selected from the group consisting of G, T and A;
position 5021 to position 5029, except that the nucleotide at position 5025 is replaced with a nucleotide selected from the group consisting of G, T and A;
position 5132 to position 3140, except that the nucleotide at position 5136 is replaced with a nucleotide selected from the group consisting of G, C and A;
position 5513 to position 5521, except that the nucleotide at position 5517 is replaced with a nucleotide from the group consisting of G, C and A;
position 2529 to position 2537, except that the nucleotide at position 2533 is replaced with a nucleotide selected from the group consisting of G, C and A;
position 3367 to position 3375, except that the nucleotide at position 3371 is replaced with a nucleotide selected from the group consisting of G, C and T;
position 4623 to position 4631, except that the nucleotide at position 4627 is replaced with a nucleotide selected from the group consisting of G, C and A;
position 4723 to position 4731, except that the nucleotide at position 4727 is replaced with a nucleotide selected from the group consisting of G, T and C;
position 4809 to position 4817, except that the nucleotide at position 4813 is replaced with a nucleotide selected from the group consisting of G, C and T; and
position 5196 to position 5204, except that the nucleotide at position 5200 is replaced with a nucleotide from the group consisting of T, C and A.

22. An isolated nucleic acid molecule, comprising at least 16, 18, 20, 22, 24, 26, 28 or at least 30 contiguous nucleotides of an IDE allele; wherein the contiguous nucleotides comprise a sequence of 5 contiguous nucleotides of SEQ ID NO: 186, or the complement thereof, selected from the group of nucleotide ranges consisting of one or more of:
position 2452 to position 2460, except that the nucleotide at position 2456 is replaced with a nucleotide selected from the group consisting of C, G and A;
position 3275 to position 3283, except that the nucleotide at position 3279 is replaced with a nucleotide selected from the group consisting of C, G and A;
position 3403 to position 3411, except that the nucleotide at position 3407 is replaced with a nucleotide selected from the group consisting of T, G and A;
position 42939 to position 42947, except that the nucleotide at position 42943 is replaced with a nucleotide selected from the group consisting of C, G and A;
position 62494 to position 62502, except that the nucleotide at position 62498 is replaced with a nucleotide selected from the group consisting of C, G and A;
position 69582 to position 69590, except that the nucleotide at position 69586 is replaced with a nucleotide selected from the group consisting of G, C and A;
position 107391 to position 107399, except that the nucleotide at position 107395 is replaced with a nucleotide selected from the group consisting of T, C and A;
position 112110 to position 112118, except that the nucleotide at position 112114 is replaced with a nucleotide selected from the group consisting of C, T and A; and/or
a sequence of 5 contiguous nucleotides complementary to SEQ ID NO: 484 selected from the group of nucleotide ranges consisting of one or more of:
position 816 to position 824, except that the complementary nucleotide at position 820 is replaced with a nucleotide selected from the group consisting of C, G and T;
position 7062 to position 7070, except that the complementary nucleotide at position 7066 is replaced with a nucleotide selected from the group consisting of T, C and G;
position 7062 to position 7070, except that the complementary nucleotide at position 7066 is replaced with a nucleotide selected from the group consisting of T, C and G;
position 21266 to position 21274, except that the complementary nucleotide at position 21270 is replaced with a nucleotide selected from the group consisting of A, C and G;
position 22221 to position 22229, except that the complementary nucleotide at position 22225 is replaced with a nucleotide selected from the group consisting of C, G and T;
position 29290 to position 29298, except that the complementary nucleotide at position 29294 is replaced with a nucleotide selected from the group consisting of A, G and T;
position 33448 to position 33456, except that the complementary nucleotide at position 33452 is replaced with a nucleotide selected from the group consisting of A, C and G;
position 33703 to position 33712, except that the complementary nucleotide at position 33708 is replaced with a nucleotide selected from the group consisting of A, C and T;
position 36978 to position 36986, except that the complementary nucleotide at position 36982 is replaced with a nucleotide selected from the group consisting of A, G, and T;
position 77782 to position 77790, except that the complementary nucleotide at position 77786 is replaced with a nucleotide selected from the group consisting of A, G and T;
position 80590 to position 80598, except that the complementary nucleotide at position 80594 is replaced with a nucleotide selected from the group consisting of A, C and T;
position 84993 to position 85001, except that the complementary nucleotide at position 84997 is replaced with a nucleotide selected from the group consisting of A, C, and G;
position 86678 to position 86686, except that the complementary nucleotide at position 86682 is replaced with a nucleotide selected from the group consisting of A, G and T;
position 86853 to position 86861, except that the complementary nucleotide at position 86857 is replaced with a nucleotide selected from the group consisting of A, C and G;
position 88507 to position 88515, except that the complementary nucleotide at position 88511 is replaced with a nucleotide selected from the group consisting of C, G and T;
position 90433 to position 90441, except that the complementary nucleotide at position 90437 is replaced with a nucleotide selected from the group consisting of A, C and T;
position 90581 to position 90597, except that the complementary nucleotide at position 90593 is replaced with a nucleotide selected from the group consisting of A, C and T;
position 91546 to position 91654, except that the complementary nucleotide at position 91650 is replaced with a nucleotide selected from the group consisting of A, C and G;
position 91864 to position 91874, except that the complementary nucleotide at position 91870 is replaced with a nucleotide selected from the group consisting of C, G and T;
position 91874 to position 91882, except that the complementary nucleotide at position 91878 is replaced with a nucleotide selected from the group consisting of A, C and T;
position 92007 to position 92015, except that the complementary nucleotide at position 92011 is replaced with a nucleotide selected from the group consisting of A, G and T;
position 93614 to position 93622, except that the complementary nucleotide at position 93618 is replaced with a nucleotide selected from the group consisting of A, C and G;
position 94340 to position 94348, except that the complementary nucleotide at position 94344 is replaced with a nucleotide selected from the group consisting of A, C and G;
position 94710 to position 94718, except that the complementary nucleotide at position 94714 is replaced with a nucleotide selected from the group consisting of C, G and T;
position 95667 to position 95675, except that the complementary nucleotide at position 95671 is replaced with a nucleotide selected from the group consisting of A, C and G;
position 96320 to position 96328, except that the complementary nucleotide at position 96324 is replaced with a nucleotide selected from the group consisting of A, G and T;
position 97298 to position 97306, except that the complementary nucleotide at position 97302 is replaced with a nucleotide selected from the group consisting of A, C and T;
position 37366 to position 97374, except that the complementary nucleotide at position 97370 is replaced with a nucleotide selected from the group consisting of A, C and T;
position 98249 to position 98257, except that the complementary nucleotide at position 98253 is replaced with a nucleotide selected from the group consisting of A, C and G;
position 98381 to position 98389, except that the complementary nucleotide at position 98385 is replaced with a nucleotide selected from the group consisting of C, G and T;
position 98641 to position 98650, except that the complementary nucleotide at position 98646 is replaced with a nucleotide selected from the group consisting of C, G and T;
position 98810 to position 98818, except that the complementary nucleotide at position 98814 is replaced with a nucleotide selected from the group consisting of A, C and T;
position 99593 to position 99601, except that the complementary nucleotide at position 99597 is replaced with a nucleotide selected from the group consisting of A, C and G;
position 100374 to position 100382, except that the complementary nucleotide at position 100378 is replaced with a nucleotide selected from the group consisting of A, C and G;
position 101025 to position 101033, except that the complementary nucleotide at position 101029 is replaced with a nucleotide selected from the group consisting of C, G and T;
position 101261 to position 101269, except that the complementary nucleotide at position 101265 is replaced with a nucleotide selected from the group consisting of A, C and G;
position 102461 to position 102469, except that the complementary nucleotide at position 102465 is replaced with a nucleotide selected from the group consisting of A, G and T;
position 103285 to position 103293, except that the complementary nucleotide at position 103289 is replaced with a nucleotide selected from the group consisting of A, C and T;
position 103963 to position 103971, except that the complementary nucleotide at position 103967 is replaced with a nucleotide selected from the group consisting of A, G and T;
position 105789 to position 105797, except that the complementary nucleotide at position 105793 is replaced with a nucleotide selected from the group consisting of C, G and T;
position 106072 to position 106080, except that the complementary nucleotide at position 106076 is replaced with a nucleotide selected from the group consisting of A, C and T;
position 106991 to position 106999, except that the complementary nucleotide at position 106995 is replaced with a nucleotide selected from the group consisting of A, C and T;
position 107847 to position 107855, except that the complementary nucleotide at position 107851 is replaced with a nucleotide selected from the group consisting of A, G and T;
position 108430 to position 108438, except that the complementary nucleotide at position 108434 is replaced with a nucleotide selected from the group consisting of A, C and T;
position 109092 to position 109100, except that the complementary nucleotide at position 109096 is replaced with a nucleotide selected from the group consisting of A, G and T;
position 109395 to position 1093403, except that the complementary nucleotide at position 109399 is replaced with a nucleotide selected from the group consisting of A, G and T;
position 109479 to position 109487, except that the complementary nucleotide at position 109483 is replaced with a nucleotide selected from the group consisting of A, C And T;
position 110866 to position 110874, except that the complementary nucleotide at position 110870 is replaced with a nucleotide selected from the group consisting of A, C and T;
position 111185 to position 111193, except that the complementary nucleotide at position 111189 is replaced with a nucleotide selected from the group consisting of C, G and T;
position 111968 to position 111976, except that the complementary nucleotide at position 111972 is replaced with a nucleotide selected from the group consisting of A, C and T;
position 112623 to position 112631, except that the complementary nucleotide at position 112627 is replaced with a nucleotide selected from the group consisting of C, G and T;
position 113403 to position 113411, except that the complementary nucleotide at position 113407 is replaced with a nucleotide selected from the group consisting of A, C and T;
position 114478 to position 114486, except that the complementary nucleotide at position 114482 is replaced with a nucleotide selected from the group consisting of A, C and T;
position 115469 to position 115477, except that the complementary nucleotide at position 115473 is deleted;
position 116677 to position 116685, except that the complementary nucleotide at position 116681 is replaced with a nucleotide selected from the group consisting of A, C and G;
position 117222 to position 117230, except that the complementary nucleotide at position 117226 is replaced with a nucleotide selected from the group consisting of C, G and T;
position 117596 to position 117604, except that the complementary nucleotide at position 117600 is replaced with a nucleotide selected from the group consisting of T, C and G; position 118219 to position 118227, except that the complementary nucleotide at position 118223 is replaced with a nucleotide selected from the group consisting of T, A and G;
position 120007 to position 120015, except that the complementary nucleotide at position 120011 is replaced with a nucleotide selected from the group consisting of A, G and T;
position 122256 to position 122264, except that the complementary nucleotide at position 122260 is replaced with a nucleotide selected from the group consisting of A, C and G;
position 123161 to position 123169, except that the complementary nucleotide at position 123165 is replaced with a nucleotide selected from the group consisting of A, C and G;
position 123420 to position 123428, except that the complementary nucleotide at position 123424 is replaced with a nucleotide selected from the group consisting of A, G and T;
position 124348 to position 124356, except that the complementary nucleotide at position 124352 is replaced with a nucleotide selected from the group consisting of A, C and T;
position 124497 to position 124505, except that the complementary nucleotide at position 124501 is replaced with a nucleotide selected from the group consisting of A, C and T;
position 124688 to position 124696, except that the complementary nucleotide at position 124692 is replaced with a nucleotide selected from the group consisting of A, C and G;
position 125109 to position 125117, except that the complementary nucleotide at position 125113 is replaced with a nucleotide selected from the group consisting of C, G and T;
position 125154 to position 125163, except that the complementary nucleotide at position 125159 is replaced with a nucleotide selected from the group consisting of A, G and T;
position 126564 to position 126572, except that the complementary nucleotide at position 126568 is replaced with a nucleotide selected from the group consisting of A, G and T;
position 127162 to position 127170, except that the complementary nucleotide at position 127166 is replaced with a nucleotide selected from the group consisting of A, C and T;
position 127594 to position 127602, except that the complementary nucleotide at position 127598 is replaced with a nucleotide selected from the group consisting of C, G and T;
position 127596 to position 127604, except that the complementary nucleotide at position 127600 is replaced with a nucleotide selected from the group consisting of C, G and T;
position 127605 to position 127613, except that the complementary nucleotide at position 127609 is replaced with a nucleotide selected from the group consisting of C, G and T;
position 127610 to position 127618, except that the complementary nucleotide at position 127614 is replaced with a nucleotide selected from the group consisting of C, G and T;
position 127619 to position 127627, except that the complementary nucleotide at position 127623 is replaced with a nucleotide selected from the group consisting of C, G and T;
position 127658 to position 127666, except that the complementary nucleotide at position 127662 is replaced with a nucleotide selected from the group consisting of A, C and G;
position 128049 to position 128057, except that the complementary nucleotide at position 128053 is replaced with a nucleotide selected from the group consisting of A, C and T;
position 128257 to position 128296, except that at complementary nucleotide positions 128261-128292, 1 or 2 -TAAA- repeats are deleted;
position 128285 to position 128293, except that the complementary nucleotide at position 128289 is replaced with a nucleotide selected from the group consisting of A, C and G;
position 128287 to position 128295, except that the complementary nucleotide at position 128291 is replaced with a nucleotide selected from the group consisting of C, G and T;
position 128389 to position 128397, except that the complementary nucleotide at position 128393 is replaced with a nucleotide selected from the group consisting of C, G and T; and
position 129440 to position 129448, except that complemetary the nucleotide at position 129444 is replaced with a nucleotide selected from the group consisting of C, G and T.

23. An isolated nucleic acid molecule, comprising at least 16, 18, 20, 22, 24, 26, 28 or at least 30 contiguous nucleotides of a KNSL1 allele; wherein the contiguous nucleotides include a sequence of 5 contiguous nucleotides of SEQ ID NO: 347 selected from the group of nucleotide positions corresponding to one or more of: position 295 to position 303, except that between nucleotides 299 and 300 a dinucleotide corresponding to -CA- is inserted;
position 1148 to position 1156, except that the nucleotide at position 1152 is replaced with a nucleotide selected from the group consisting of A, C and T;
position 14230 to position 14238, except that between nucleotides 14234 and 14235, a nucleotide selected from the group consisting of T, C, G and A is inserted;
position 15100 to position 15108, except that the nucleotide at position 15104 is replaced with a nucleotide selected from the group consisting of T, C and G;
position 20811 to position 20819, except that the nucleotide at position 20815 is replaced with a nucleotide selected from the group consisting of C, G and A;
position 36734 to position 36742, except that the nucleotides at positions 36738 and 36739 are replaced with nucleotides corresponding to -AC-, respectively;
position 41010 to position 41018, except that between nucleotides at positions 41014 and 41015, a nucleotide sequence corresponding to -AATTT- is inserted;
position 42121 to position 42129, except that the nucleotide at position 42125 is replaced with a nucleotide selected from the group consisting of C, G and A;
position 56702 to position 56710, except that the nucleotide at position 56706 is replaced with a nucleotide selected from the group consisting of G, T and A;
position 56883 to position 56891, except that the nucleotide at position 56887 is replaced with a nucleotide selected from the group consisting of C, T and G;
position 58520 to position 58528, except that the nucleotide at position 58524 is replaced with a nucleotide selected from the group consisting of G, T and A; and/or
a sequence of 5 contiguous nucleotides of SEQ ID NO: 484 selected from the group of nucleotide ranges consisting of one or more of:
position 130872 to position 130880, except that the nucleotide at position 130876 is replaced with a nucleotide selected from the group consisting of A, G and T;
position 131374 to position 131382, except that the nucleotide at position 131378 is replaced with a nucleotide selected from the group consisting of C, G and T;
position 131612 to position 131620, except that the nucleotide at position 131616 is replaced with a nucleotide selected from the group consisting of C, G and T;
position 131616 to position 131624, except that the nucleotide at position 131620 is replaced with a nucleotide selected from the group consisting of C, G and T;
position 131684 to position 131692, except that the nucleotide at position 131688 is replaced with a nucleotide selected from the group consisting of A, C and G;
position 131994 to position 132007, except that the nucleotides at positions 131998-132003 are deleted;
position 132000 to position 132036, except that the 29 base pair poly-T repeat at nucleotide positions 132004-132032 is replaced with either a 9, 16, 21 or 26 base pair poly-T repeat;
position 132693 to position 132701, except that the nucleotide at position 132697 is replaced with a nucleotide selected from the group consisting of C, G and T;
position 132964 to position 132972, except that the nucleotide at position 132968 is replaced with a nucleotide selected from the group consisting of A, G and T;
position 133351 to position 133359, except that between nucleotides at positions 133354-133355 is either a 6, 7, or 8 base pair poly-T insertion;
position 133802 to position 133810, except that the nucleotide at position 133806 is replaced with a nucleotide selected from the group consisting of A, C and G;
position 134026 to position 134034, except that the nucleotide at position 134030 is replaced with a nucleotide selected from the group consisting of A, C and T;
position 134287 to position 134295, except that the nucleotide at position 134291 is replaced with a nucleotide selected from the group consisting of A, C and T;
position 134657 to position 134665, except that the nucleotide at position 134661 is replaced with a nucleotide selected from the group consisting of A, C and T;
position 137083 to position 137091, except that the nucleotide at position 137087 is replaced with a nucleotide selected from the group consisting of C, G and T;
position 137138 to position 137146, except that the nucleotide at position 137142 is replaced with a nucleotide selected from the group consisting of A, C and T;
position 138392 to position 138370, except that the nucleotide at position 138396 is replaced with a nucleotide selected from the group consisting of A, G and T;
position 140661 to position 140669, except that the nucleotide at position 140665 is replaced with a nucleotide selected from the group consisting of A, C and G;
position 140732 to position 140740, except that the nucleotide at position 140736 is replaced with a nucleotide selected from the group consisting of C, G and T;
position 141169 to position 141177, except that the nucleotide at position 141173 is replaced with a nucleotide selected from the group consisting of C, G and T;
position 142052 to position 142070, except that the nucleotide at position 142056 is replaced with a nucleotide selected from the group consisting of A, C and G;
position 142773 to position 142781, except that between nucleotides at positions 142776-142777 is an -AG- insertion;
position 143021 to position 143029, except that the nucleotide at position 143025 is replaced with a nucleotide selected from the group consisting of A, C and G;
position 143725 to position 143733, except that the nucleotide at position 143729 is replaced with a nucleotide selected from the group consisting of A, G and T;
position 144480 to position 144488, except that the nucleotide at position 144484 is replaced with a nucleotide selected from the group consisting of C, G and T;
position 146177 to position 146185, except that the nucleotide at position 146181 is replaced with a nucleotide selected from the group consisting of A, C and G;
position 147047 to position 147055, except that the nucleotide at position 147051 is replaced with a nucleotide selected from the group consisting of A, C and T;
position 147318 to position 147326, except that the nucleotide at position 147322 is replaced with a nucleotide selected from the group consisting of A, G and T;
position 147703 to position 147711, except that the nucleotide at position 147707 is replaced with a nucleotide selected from the group consisting of A, C and T;
position 147838 to position 147849, except that the nucleotides at positions 147842-147845 are deleted;
position 148076 to position 148084, except that the nucleotide at position 148080 is replaced with a nucleotide selected from the group consisting of A, G and T;
position 149022 to position 149047, except that the 18 nucleotide -AC- repeat at positions 149026-149043 is replaced with either a 17, 19 or 22 base pair -AC- repeat;
position 149040 to position 149048, except that the 30 nucleotide -GT- repeat at positions 149044-149073 is replaced with either a 22, 24, 28 or 32 base pair -GT- repeat;
position 149385 to position 149393, except that the nucleotide at position 149389 is replaced with a nucleotide selected from the group consisting of A, C and T;
position 149999 to position 150007, except that the nucleotide at position 150003 is replaced with a nucleotide selected from the group consisting of A, C and T;
position 150380 to position 150388, except that the nucleotide at position 150384 is replaced with a nucleotide selected from the group consisting of A, C and T;
position 150450 to position 150458, except that the nucleotide at position 150454 is replaced with a nucleotide selected from the group consisting of A, G and T;
position 150682 to position 150690, except that the nucleotide at position 150686 is replaced with a nucleotide selected from the group consisting of A, C and T;
position 151339 to position 151347, except that the nucleotide at position 151343 is replaced with a nucleotide selected from the group consisting of A, G and T;
position 151957 to position 151965, except that the nucleotide at position 151961 is replaced with a nucleotide selected from the group consisting of A, G and T;
position 152115 to position 152123, except that the nucleotide at position 152119 is replaced with a nucleotide selected from the group consisting of A, G and T;
position 153787 to position 153795, except that the nucleotide at position 153791 is replaced with a nucleotide selected from the group consisting of A, G and T;
position 154324 to position 154332, except that the nucleotide at position 154328 is replaced with a nucleotide selected from the group consisting of C, G and T;
position 154509 to position 154517, except that the nucleotide at position 154513 is replaced with a nucleotide selected from the group consisting of A, G and T;
position 154635 to position 154643, except that the nucleotide at position 154639 is replaced with a nucleotide selected from the group consisting of A, C and T;
position 155045 to position 155053, except that the nucleotide at position 155049 is replaced with a nucleotide selected from the group consisting of A, C and G;
position 155110 to position 155118, except that the nucleotide at position 155114 is replaced with a nucleotide selected from the group consisting of A, C and G;
position 158036 to position 158044, except that the nucleotide at position 158040 is replaced with a nucleotide selected from the group consisting of A, G and T;
position 158891 to position 158899, except that the nucleotide at position 158895 is replaced with a nucleotide selected from the group consisting of A, C and T;
position 191280 to position 191288, except that the nucleotide at position 191284 is replaced with a nucleotide selected from the group consisting of A, G and T;
position 192268 to position 192276, except that the nucleotide at position 192272 is replaced with a nucleotide selected from the group consisting of A, G and T;
position 192694 to position 192702, except that the nucleotide at position 192698 is replaced with a nucleotide selected from the group consisting of C, G and T; and
position 193702 to position 193710, except that the nucleotide at position 193706 is replaced with a nucleotide selected from the group consisting of A, C and G.

24. An isolated nucleic acid molecule, comprising at least 16, 18, 20, 22, 24, 26, 28 or at least 30 contiguous nucleotides of a LIPA allele; wherein the contiguous nucleotides include a sequence of 5 contiguous nucleotides of SEQ ID NO: 467 selected from the group of nucleotide positions corresponding to one or more of: position 1193 to position 1201, except that the nucleotide at position 1197 is replaced with a nucleotide selected from the group consisting of T, G and A;
position 1303 to position 1313, except that the nucleotides at positions 1307-1309 are deleted;
position 6059 to position 6067, except that the nucleotide at position 6063 is replaced with a nucleotide selected from the group consisting of T, C and A;
position 7816 to position 7824, except that the nucleotide at position 7820 is replaced with a nucleotide selected from the group consisting of T, G and A;
position 28449 to position 28469, except that the nucleotides at positions 28453-28465 are deleted;
position 28539 to position 28547, except that the nucleotide at position 28543 is replaced with a nucleotide selected from the group consisting of G, T and A; and
position 28742 to position 28750, except that the nucleotide at position 28746 is replaced with a nucleotide selected from the group consisting of C, T and G.

25. An isolated nucleic acid molecule, comprising at least 16, 18, 20, 22, 24, 26, 28 or at least 30 contiguous nucleotides of a TNFRSF6 allele; wherein the contiguous nucleotides include a sequence of 5 contiguous nucleotides of SEQ ID NO: 402 selected from the group of nucleotide positions corresponding to one or more of: position 1526 to position 1534, except that the nucleotide at position 1530 is replaced with a nucleotide selected from the group consisting of C, G and A; position 14521 to position 14529, except that the nucleotide at position 14525 is replaced with a nucleotide selected from the group consisting of C, T and A;
position 14710 to position 14718, except that the nucleotide at position 14714 is replaced with a nucleotide selected from the group consisting of T, G and A;
position 19065 to position 19073, except that the nucleotide at position 19069 is replaced with a nucleotide selected from the group consisting of G, C and T;
position 20408 to position 20416, except that the nucleotide at position 20412 is replaced with a nucleotide selected from the group consisting of C, T and G;
position 20548 to position 20556, except that the nucleotide at position 20552 is replaced with a nucleotide selected from the group consisting of T, G and C;
position 23195 to position 23203, except that the nucleotide at position 23199 is replaced with a nucleotide selected from the group consisting of C, T and A;
position 23412 to position 23420, except that the nucleotide at position 23416 is replaced with a nucleotide selected from the group consisting of C, A and G;
position 1922 to position 1930, except that the nucleotide at position 1926 is replaced with a nucleotide selected from the group consisting of C, T and A; and
position 2265 to position 2273, except that the nucleotide at position 2269 is replaced with a nucleotide selected from the group consisting of C, A and T.

26. The isolated nucleic acid molecule of claim 21, wherein at least 16 contiguous nucleotides of a SNCG allele are contained in SEQ ID NO: 73.

27. The isolated nucleic acid molecule of claim 22, wherein at least 16 contiguous nucleotides of an IDE allele are contained in SEQ ID NO: 187 or SEQ ID NO: 484.

28. The isolated nucleic acid molecule of claim 23, wherein at least 16 contiguous nucleotides of an KNSL1 allele are contained in SEQ ID NO: 348 or SEQ ID NO: 484.

29. The isolated nucleic acid molecule of claim 24, wherein at least 16 contiguous nucleotides of an LIPA allele are contained in SEQ ID NO: 468.

30. The isolated nucleic acid molecule of claim 25, wherein at least 16 contiguous nucleotides of a TNFRSF6 allele are contained in SEQ ID NO: 403.

31. A nucleic acid vector, comprising the nucleic acid molecule of any of claims 21-30.

32. A cell containing the nucleic acid vector of claim 31.

33. A primer, probe or antisense nucleic acid molecule, comprising a sequence of nucleotides that specifically hybridizes adjacent to, or at a polymorphic region of, a SNCG allele spanning a nucleotide position of SEQ ID NO: 73, or the complement thereof, selected from the group consisting of nucleotide positions 915, 987, 2533, 3151, 3178, 3189, 3284, 3371, 3779, 4156, 4276, 4311, 4627, 4727, 4813, 5136, 5200 and 5517.

34. A primer, probe or antisense nucleic acid molecule, comprising a sequence of nucleotides that specifically hybridizes adjacent to, or at a polymorphic region of, an IDE allele spanning a nucleotide position of SEQ ID NO: 187, or the complement thereof, selected from the group consisting of nucleotide positions 2456, 3279, 3407, 42943, 62498, 69586, 107395 and 112114; or spanning a nucleotide position of SEQ ID NO: 484, or the complement thereof, selected from the group consisting of nucleotide positions 820, 7066, 11758, 21270, 22225, 29294, 33452, 33708, 36982, 54862, 77786, 80594, 84792, 84997, 86682, 86857, 88511, 90437, 90593, 91650, 91870, 91878, 92011, 93618, 94344, 94714, 95671, 96324, 97302, 97370, 98253, 98276, 98385, 98646, 98814, 99597, 100378, 101029, 101265, 102465, 103289, 103967, 105793, 106076, 106453, 106600, 106995, 107851, 108434, 109096, 109399, 109483, 110870, 111189, 111972, 112627, 112629, 112631, 113407, 114444, 114482, 115473, 116681, 117226, 117600, 117802, 118223, 120011, 122260, 123165, 123424, 124352, 124501, 124692, 125113, 125159, 126568, 127166, 127598, 127600, 127609, 127614, 127623, 127662, 128053, 128261, 128289, 128291, 128393, and 129444.

35. A primer, probe or antisense nucleic acid molecule, comprising a sequence of nucleotides that specifically hybridizes adjacent to, or at a polymorphic region of, a KNSL1 allele spanning a nucleotide position of SEQ ID NO: 348, or the complement thereof, selected from the group consisting of nucleotide positions 300, 1152, 14235, 15104, 20815, 36738-36739, 41015, 42125, 56706, 56887 and 58524; or spanning a nucleotide position of SEQ ID NO: 484, or the complement thereof, selected from the group consisting of nucleotide positions 130876, 131378, 131616, 131620, 131688, 131998, 132004, 132370, 132697, 132968, 133355, 133806, 134030, 134291, 134661, 137087, 137142, 138396, 140665, 140736, 141173, 142056, 142777, 143025, 143729, 144484, 146181, 147051, 147322, 147707, 147842, 148080, 149026, 149044, 149389, 150003, 150384, 150454, 150686, 151343, 151961, 152119, 153791, 154328, 154513, 154639, 155049, 155114, 158040, 158895, 191284, 192272, 192698, and 193706.

36. A primer, probe or antisense nucleic acid molecule, comprising a sequence of nucleotides that specifically hybridizes adjacent to, or at a polymorphic region of, a LIPA allele spanning a nucleotide position of SEQ ID NO: 468, or the complement thereof, selected from the group consisting of nucleotide positions 1197, 7820, 28543 and 28746.

37. A primer, probe or antisense nucleic acid molecule, comprising a sequence of nucleotides that specifically hybridizes adjacent to, or at a polymorphic region of, a TNFRSF6 allele spanning a nucleotide position of SEQ ID NO: 403, or the complement thereof, selected from the group consisting of nucleotide positions 1530, 14525, 14714, 19069, 20412, 20552, 23199, 23416, 1926 and 2269.

38. A method for predicting a response of a subject to a drug used to treat neurodegenerative disease, comprising:
detecting, in said subject, the presence or absence of an allelic variant of one or more polymorphic regions of one or more genes selected from the group consisting of uPA, SNCG, IDE, KNSL1, LIPA and TNFRSF6;
wherein the presence of at least one allelic variant is indicative of a positive or negative response.

39. The method of claim 38, wherein the neurodegenerative disease is Alzheimer's disease.

40. The method of claim 38, wherein the gene is SNCG.

41. The method of claim 38, wherein the gene is IDE.

42. The method of claim 38, wherein the gene is KNSL.

43. The method of claim 38, wherein the gene is LIPA.

44. The method of claim 38, wherein the gene is TNFRSF6.

45. The method of claim 40, wherein the one or more polymorphic regions occurs at a nucleotide position corresponding to a nucleotide position selected from the group of nucleotide positions of SEQ ID NO: 73 consisting of 560, 590, 617, 645, 915, 987, 1723, 1943, 1950, 3151, 3178, 3189, 3284, 3779, 4156, 4276, 4311, 4552, 4976, 4995, 5019, 5025, 5112, 5136, 5517, 2533, 3371, 4627, 4727, 4813 and 5200, or the complement thereof.

46. The method of claim 41, wherein the one or more polymorphic regions occurs at a nucleotide position corresponding to a nucleotide position selected from the group of nucleotide positions of SEQ ID NO: 187 consisting of 2456, 3279, 3407, 42943, 62498, 69586, 107395, 112114, and 116662, or the complement thereof; or the group of nucleotide positions of SEQ ID NO: 484, or the complement thereof, consisting of nucleotide positions 820, 7066, 11758, 21270, 22225, 29294, 33452, 33708, 36982, 54862, 77786, 80594, 84792, 84997, 86682, 86857, 88511, 90437, 90593, 91650, 91870, 91878, 92011, 93618, 94344, 94714, 95671, 96324, 97302, 97370, 98253, 98276, 98385, 98646, 98814, 99597, 100378, 101029, 101265, 102465, 103289, 103967, 105793, 106076, 106453, 106600, 106995, 107851, 108434, 109096, 109399, 109483, 110870, 111189, 111972, 112627, 112629, 112631, 113407, 114444, 114482, 115473, 116681, 117226, 117600, 117802, 118223, 120011, 122260, 123165, 123424, 124352, 124501, 124692, 125113, 125159, 126568, 127166, 127598, 127600, 127609, 127614, 127623, 127662, 128053, 128261, 128289, 128291, 128393, and 129444.

47. The method of claim 42, wherein the one or more polymorphic regions occurs at a nucleotide position corresponding to a nucleotide position selected from the group of nucleotide positions of SEQ ID NO: 348 consisting of 300, 1152, 14235, 15104, 20815, 35719, 36738-36739, 41015, 42125, 45083, 45887, 56706, 56887, 58524, 62661 and 63802, or the complement thereof; or the group of nucleotide positions of SEQ ID NO: 484, or the complement thereof, consisting of nucleotide positions 130876, 131378, 131616, 131620, 131688, 131998, 132004, 132370, 132697, 132968, 133355, 133806, 134030, 134291, 134661, 137087, 137142, 138396, 140665, 140736, 141173, 142056, 142777, 143025, 143729, 144484, 146181, 147051, 147322, 147707, 147842, 148080, 149026, 149044, 149389, 150003, 150384, 150454, 150686, 151343, 151961, 152119, 153791, 154328, 154513, 154639, 155049, 155114, 158040, 158895, 191284, 192272, 192698, and 193706.

48. The method of claim 43, wherein the one or more polymorphic regions occurs at a nucleotide position corresponding to a nucleotide position selected from the group of nucleotide positions of SEQ ID NO: 468 consisting of 1197, 1307 to 1309, 1841, 1852, 2075, 6063, 6173, 6194, 7820, 25283, 28453 to 28465, 28543, 28746, 29904, 37861, 39834, and 40018, or the complement thereof.

49. The method of claim 44, wherein the one or more polymorphic regions occurs at a nucleotide position corresponding to a nucleotide position selected from the group of nucleotide positions of SEQ ID NO: 403 consisting of 1530, 1550, 14525, 14714, 18982, 19069, 20412, 20552, 23199, 23416, 24890, 26359, 1926, 2269, 18934, 19227 and 22026, or the complement thereof.

50. The method of claim 45, wherein the nucleotide at position 560 is G or A, at position 590 is A or C, at position 617 is C or T, at position 645 is G or A, at position 915 is T or G, at position 987 is C or A, at position 1723 is A or G, at position 1943 is G or C, at position 1950 is G or A, at position 3151 is A or G, at position 3178 is T or C, at position 3189 is T or C, at position 3284 is G or A, at position 3779 is T or position 3779 is deleted, at position 4156 corresponds to a single nucleotide G that is either inserted or not inserted, at position 4276 is T or A, at position 4311 is C or T, at position 4552 is T or A, at position 4976 is C or position 4976 is deleted, at position 4995 is C or G, at position 5019 is C or T, at position 5025 is C or A, at position 5112 is T or A, at position 5136 is T or A, at position 5517 is T or C, at position 2533 is T or G, at position 3371 is A or C, at position 4627 is T or G, at position 4727 is A or G, at position 4813 is A or C, and at position 5200 is G or C.

51. The method of claim 46, wherein the nucleotide at position 2456 is T or G, at position 3279 is T or C, at position 3407 is C or T, at position 42943 is T or C, at position 62498 is T or C, at position 69586 is T or C, at position 107395 is G or A, at position 112114 is G or A, and at position 116662 is T or A; and wherein the complementary nucleotide in SEQ ID NO: 484 at position 820 is A or T, at position 7066 is A or G, at position 11758 is T or C, at position 21270 is T or G, at position 22225 is A or T, at position 29294 is C or T, at position 33452 is G or T, at position 33708 is G or A, at position 36982 is C or T, at position 54862 is A or G, at position 77786 is C or A, at position 80594 is G or A, at position 84792 is T or C, at position 84997 is G or T, at position 86682 is C or T, at position 86857 is T or A, at position 88511 is A or G, at position 90437 is G or T, at position 90593 is G or A, at position 91650 is T or C, at position 91870 is G or A, at position 91878 is G or A, at position 92011 is C or T, at position 93618 is T or C, at position 94344 is C or T, at position 94714 is A or G, at position 95671 is A or G, at position 96324 is A or G, at position 97302 is G or A, at position 97370 is G or A, at position 98253 is T or C, at position 98276 is C or T, at position 98385 is A or G, at position 98646 is T or A, at position 98814 is G or A, at position 99597 is C or T, at position 100378 is T or C, at position 101029 is G or A, at position 101265 is C or T, at position 102465 is C or G, at position 103289 is T or G, at position 103967 is C or T, at position 105793 is A or G, at position 106076 is G or T, at position 106453 is C or T, at position 106600 is A or G, at position 106995 is G or A, at position 107851 is C or T, at position 108434 is G or C, at position 109096 is C or T, at position 109399 is C or T, at position 109483 is T or G, at position 110870 is G or A, at position 111189 is A or G, at position 111972 is G or A, at position 112627 is A or T, at position 112629 is A or T, at position 112631 is T or A, at position 113407 is C or G, at position 114444 is C or G, at position 114482 is G or C, at position 115473 is C or position 115473 is deleted, at position 116681 is G or T, at position 117226 is A or T, at position 117600 is A or G, at position 117802 is C or T, at position 118223 is G or C, at position 120011 is C or T, at position 122260 is A or G, at position 123165 is A or G, at position 123424 is G or A, at position 124352 is A or G, at position 124501 is C or T, at position 124692 is A or G, at position 125113 is T or A, at position 125159 is G or A, at position 126568 is G or C, at position 127166 is C or G, at position 127598 is T or C, at position 127600 is T or C, at position 127609 is T or C, at position 127614 is T or C, at position 127623 is T or C, at position 127662 is G or A, at position 128053 is G or A, at position 128261 is a repeat of -TAAA- occurring 6, 7, or 8 times beginning at position 128261, at position 128289 is A or T, at position 128291 is T or G, at position 128393 is T or G, at position 129444 is C or T.

52. The method of claim 47, the nucleotide at position 300 corresponds to a dinucleotide -CA- that is either inserted or not inserted beginning at position 300, at position 1152 is G or T, at position 14235 corresponds to a single nucleotide T that is either inserted or not inserted, at position 15104 is A or G, at position 20815 is T or C, at position 35719 is T or C, at positions 36738-36739 is a dinucleotide corresponding to CA or AC, at position 41015 corresponds to the oligonucleotide -AATTT- that is either inserted or not inserted beginning at position 41015, at position 42125 is T or G, at position 45083 is C or T, at position 45887 is G or C, at position 56706 is C or T, at position 56887 is A or G, at position 58524 is C or T, at position 62661 is C or T, and at position 63802 is A or C; and wherein the nucleotide in SEQ ID NO: 484 at position 130876 is T or C, at position 131378 is G or A, at position 131616 is G or A, at position 131620 is G or A, at position 131688 is T or G, at positions 131998-131203 are CTTTTC- or positions 131998-131203 are deleted, at position 132004 is either a 9, 16, 21, 26, or 29 base pair poly-T repeat beginning at nucleotide 132004, at position 132370 is A or G, at position 132697 is A or G, at position 132968 is C or T, at position 133355 is either a 6, 7 or 8 base pair poly-T repeat beginning at nucleotide 133355, at position 133806 is T or G, at position 134030 is G or A, at position 134291 is A or G, at position 134661 is G or A, at position 137087 is A or G, at position 137142 is G or A, at position 138396 is C or T, at position 140665 is T or G, at position 140736 is A or G, at position 141173 is A or G, at position 142056 is T or C, at position 142777 corresponds to a dinucleotide -AG- that is either inserted or not inserted beginning at position 142777, at position 143025 is G or T, at position 143729 is C or A, at position 144484 is T or A, at position 146181 is T or A, at position 147051 is G or A, at position 147322 is C or T, at position 147707 is G or T, at positions 147842-147845 are -AGTT- or positions 147842-147845 are deleted, at position 148080 is C or T, at position 149026 is either a 17, 18, 19 or 22 base pair -AC- repeat beginning at nucleotide 149026, at position 149044 is either a 22, 24, 28, 30, 32 or 36 base pair -GT- repeat beginning at nucleotide 149044, at position 149389 is A or G, at position 150003 is G or A, at position 150384 is G or T, at position 150454 is C or T, at position 150686 is G or T, at position 151343 is C or T, at position 151961 is C or T, at position 152119 is C or T, at position 153791 is C or G, at position 154328 is A or T, at position 154513 is C or A, at position 154639 is G or A, at position 155049 is T or C, at position 155114 is T or C, at position 158040 is C or A, at position 158895 is G or A, at position 191284 is C or T, at position 192272 is C or T, at position 192698 is A or T, at position 193706 is T or A.

53. The method of claim 48, wherein the nucleotide at position 1197 is C or G, at positions 1307-1309 are ATC or positions 1307-1309 are deleted, at position 1841 is A or C, at position 1852 is G or A, at position 2075 is G or A, at position 6063 is G or T, at position 6173 is A or C, at position 6194 is G or A, at position 7820 is C or G, at position 25283 is G or C, at positions 28453-28465 are -TCCGCGAGAGGGC- or positions 28453-28465 are deleted, at position 28543 is C or T, at position 28746 is A or C, at position 29904 is G or A, at position 37861 is C or T, at position 39834 is T or A, and at position 40018 is C or T.

54. The method of claim 49, wherein the nucleotide at position 1530 is T or C, at position 1550 is A or G, at position 14525 is G or A, at position 14714 is C or T, at position 18982 is G or C, at position 19069 is A or G, at position 20412 is A or G, at position 20552 is A or G, at position 23199 is G or A, at position 23416 is T or C, at position 24890 is A or G, at position 26359 is A or T, at position 1926 is G or A, at position 2269 is G or A, at position 18934 is C or T, at position 19227 is C or T, and at position 22026 is C or G.

55. The method of claim 38, further comprising detecting the presence or absence of an allelic variant of at least one polymorphic region of at least two different genes associated with neurodegenerative disease, wherein the presence of the allelic variants of two or more genes is indicative of a positive or negative response.

56. The method of claim 55, wherein one gene of the two different genes is APOE 4.

57. The method of claim 38, wherein the detecting step is selected from the group consisting of sequencing, single-stranded conformation polymorphism, allele specific hybridization, size analysis, primer specific extension, oligonucleotide ligation assay and 5′ nuclease digestion.

58. A kit for determining whether a subject has an altered level of risk for, or the presence of, a neurodegenerative disease, comprising:
at least one container means having disposed within, at least one probe or primer of any of claims 33-37 and 151.

59. The kit of claim 58, further comprising at least one other container means having disposed within at least one probe or primer which specifically hybridizes adjacent to or at least one polymorphic region of another gene associated with Alzheimer's disease.

60. The kit of claim 59, further comprising a probe or a primer which specifically hybridizes adjacent to or at a polymorphic site of APOE4.

61. The kit of claims 60, further comprising instructions for use.

62. A solid support comprising one or more nucleic acids comprising an allelic variant of one or more polymorphic regions of one or more genes selected from the group consisting of uPA, SNCG, IDE, KNSL1, LIPA, TNFRSF6 and at least one polymorphic region of another gene associated with Alzheimer's disease.

63. The solid support of claim 62, wherein the other gene associated with Alzheimer's disease is APOE4.

64. The solid support of claim 63, which is a microarray.

65. A solid support comprising one or more nucleic acid molecules of any one of claims 33-37 and 151.

66. The solid support of claim 65, further comprising at least one polymorphic region of another gene associated with Alzheimer's disease.

67. A transgenic animal, comprising heterologous nucleic acid encoding a human protein, or portion thereof, selected from the group of human proteins consisting of uPA, SNCG, IDE, KNSL1, LIPA and TNFRSF6,
wherein the heterologous nucleic acid comprises an allelic variant of one or more polymorphic regions at one or more nucleotide positions, or complements thereof, selected from the group consisting of:
uPA nucleotide positions 9, 401, 464, 515, 748, 1229, 1356, 1752, 1942, 2127, 2543, 3029, 3169, 3799, 3947, 4808, 5287, 6532, 178, 1363, 1423, 1465, 1540, 2297, 2445, 2653, 3080, 3546, 3664, 3816, 4320, 4369, 4399, 4851, 5186, 5204, 5787, 6519, 6909, 7235, 7848, 7908 of SEQ ID NO: 559 or 560; and uPA nucleotide positions of SEQ ID NO: 563 consisting of 79, 93, 256, 385 and 714 of SEQ ID NO: 563;
SNCG nucleotide positions 560, 590, 617, 645, 915, 987, 1723, 1943, 1950, 3151, 3178, 3189, 3284, 3779, 4156, 4276, 4311, 4552, 4976, 4995, 5019, 5025, 5112, 5136, 5517, 5421, 5648, 2533, 3371, 4627, 4727, 4813 and 5200 of SEQ ID NO: 73;
IDE nucleotide positions 2456, 3279, 3407, 42943, 62498, 69586, 107395, 112114, 116662, 17095, 17242, 33590, 38903, 43391, 45017, 68906, 68973, 73772, 74084, 83024, 83104, 89301, 105060, 108489, 111914, 113142, 113591, 114683, 117803 and 124565 of SEQ ID NO: 187; the complement of IDE nucleotide positions 820, 7066, 11758, 21270, 22225, 29294, 33452, 33708, 36982, 54862, 77786, 80594, 84792, 84997, 86682, 86857, 88511, 90437, 90593, 91650, 91870, 91878, 92011, 93618, 94344, 94714, 95671, 96324, 97302, 97370, 98253, 98276, 98385, 98646, 98814, 99597, 100378, 101029, 101265, 102465, 103289, 103967, 105793, 106076, 106453, 106600, 106995, 107851, 108434, 109096, 109399, 109483, 110870, 111189, 111972, 112627, 112629, 112631, 113407, 114444, 114482, 115473, 116681, 117226, 117600, 117802, 118223, 120011, 122260, 123165, 123424, 124352, 124501, 124692, 125113, 125159, 126568, 127166, 127598, 127600, 127609, 127614, 127623, 127662, 128053, 128261, 128289, 128291, 128393, 129444, 6078, 7106, 11758, 18267, 19581,30078,54862, 73841,83448,80304, 98276, 117802 and 129124 of SEQ ID NO: 484;
KNSL1 nucleotide positions 300, 1152, 14235, 15104, 20815, 35719, 36738-36739, 41015, 42125, 45083, 45887, 56706, 56887, 58524, 62661 and 63802 of SEQ ID NO: 348; KNSL1 nucleotide positions 130876, 131378, 131616, 131620, 131688, 131998, 132004, 132370, 132697, 132968, 133355, 133806, 134030, 134291, 134661, 137087, 137142, 138396, 140665, 140736, 141173, 142056, 142777, 143025, 143729, 144484, 146181, 147051, 147322, 147707, 147842, 148080, 149026, 149044, 149389, 150003, 150384, 150454, 150686, 151343, 151961, 152119, 153791, 154328, 154513, 154639, 155049, 155114, 158040, 158895, 191284, 192272, 192698, 193706, 132370, 136968, 139284, 159167, 159403, 178748, 180149 and 180153 of SEQ ID NO: 484;
LIPA nucleotide positions 1197, 1307 to 1309, 1841, 1852, 2075, 6063, 6173, 6194, 7820, 25283, 28453 to 28465, 28543, 28746, 29904, 37861, 39834, 40018, 7219, 8242, 10114, 10606, 10688, 10729, 11559, 12031, 14497, 14729, 21145, 21329, 21404, 21429, 22246, 22354, 22621, 23802 and 25969 of SEQ ID NO: 468; and
TNFRSF6 nucleotide positions 1530, 1550, 14525, 14714, 18982, 19069, 20412, 20552, 23199, 23416, 24890, 26359, 199, 213, 843, 2967, 3103, 5335, 5345, 6074, 9374, 9907, 9936, 10937, 11200, 11279, 11359, 11503, 11511, 11587, 11694, 11905, 12193, 12208, 12238, 18511, 18567, 20640, 21585, 22439, 25081, 26878, 27670, 1926, 2269, 18934, 19227 and 22026 of SEQ ID NO: 403.

68. The transgenic animal of claim 67, which is a mouse.

69. A method of screening for an agent that modulates a biological event characteristic of Alzheimer's disease (AD) in a subject, comprising:
(a) combining a candidate agent with a cell and/or transgenic animal comprising a transgenic nucleic acid comprising an SNCG gene, or a portion thereof, containing one or more polymorphisms or allelic variants, wherein when the transgenic nucleic acid is expressed the transgenic animal develops one or more characteristics of Alzheimer's disease; and
(b) determining the effect of the agent upon one or more characteristics of Alzheimer's disease.

70. The method of claim 69, wherein the SNCG allelic variant comprises one or more polymorphic regions occurring at a nucleotide position corresponding to a nucleotide position selected from the group of nucleotide positions of SEQ ID NO: 73 consisting of 560, 590, 617, 645, 915, 987, 1723, 1943, 1950, 3151, 3178, 3189, 3284, 3779, 4156, 4276, 4311,4552, 4976, 4995, 5019, 5025, 5112, 5136, 5517, 5421, 5648, 2533, 3371, 4627, 4727, 4813 and 5200, or the complement thereof.

71. A method of screening for an agent that modulates a biological event characteristic of Alzheimer's disease (AD) in a subject, comprising:
(a) combining a candidate agent with a cell and/or transgenic animal comprising a transgenic nucleic acid comprising an IDE gene, or a portion thereof, containing one or more polymorphisms or allelic variants, wherein when the transgenic nucleic acid is expressed the transgenic animal develops one or more characteristics of Alzheimer's disease; and
(b) determining the effect of the agent upon one or more characteristics of Alzheimer's disease.

72. The method of claim 71, wherein the IDE allelic variant comprises one or more polymorphic regions occurring at a nucleotide position corresponding to a nucleotide position selected from the group of nucleotide positions of SEQ ID NO: 187 consisting of 2456, 3279, 3407, 42943, 62498, 69586, 107395, 112114, 116662, 17095, 17242, 33590, 38903, 43391, 45017, 68906, 68973, 73772, 74084, 83024, 83104, 89301, 105060, 108489, 111914, 113142, 113591, 114683, 117803 and 124565, or the complement thereof; or of SEQ ID NO: 484 consisting of 820, 7066, 11758, 21270, 22225, 29294, 33452, 33708, 36982, 54862, 77786, 80594, 84792, 84997, 86682, 86857, 88511, 90437, 90593, 91650, 91870, 91878, 92011, 93618, 94344, 94714, 95671, 96324, 97302, 97370, 98253, 98276, 98385, 98646, 98814, 99597, 100378, 101029, 101265, 102465, 103289, 103967, 105793, 106076, 106453, 106600, 106995, 107851, 108434, 109096, 109399, 109483, 110870, 111189, 111972, 112627, 112629, 112631, 113407, 114444, 114482, 115473, 116681, 117226, 117600, 117802, 118223, 120011, 122260, 123165, 123424, 124352, 124501, 124692, 125113, 125159, 126568, 127166, 127598, 127600, 127609, 127614, 127623, 127662, 128053, 128261, 128289, 128291, 128393, 129444, 6078, 7106, 11758, 18267, 19581,30078,54862, 73841,83448,80304, 98276, 117802 and 129124 or the complement thereof.

73. A method of screening for an agent that modulates a biological event characteristic of Alzheimer's disease (AD) in a subject, comprising:
(a) combining a candidate agent with a cell and/or transgenic animal comprising a transgenic nucleic acid comprising an KNSL1 gene, or a portion thereof, containing one or more polymorphisms or allelic variants, wherein when the transgenic nucleic acid is expressed the transgenic animal develops one or more characteristics of Alzheimer's disease; and
(b) determining the effect of the agent upon one or more characteristics of Alzheimer's disease.

74. The method of claim 73, wherein the KNSL1 allelic variant comprises one or more polymorphic regions occurring at a nucleotide position corresponding to a nucleotide position selected from the group of nucleotide positions of SEQ ID NO: 348 consisting of 300, 1152, 14235, 15104, 20815, 35719, 36738-36739, 41015, 42125, 45083, 45887, 56706, 56887, 58524, 62661 and 63802, or the complement thereof; or of SEQ ID NO: 484 consisting of 130876, 131378, 131616, 131620, 131688, 131998, 132004, 132370, 132697, 132968, 133355, 133806, 134030, 134291, 134661, 137087, 137142, 138396, 140665, 140736, 141173, 142056, 142777, 143025, 143729, 144484, 146181, 147051, 147322, 147707, 147842, 148080, 149026, 149044, 149389, 150003, 150384, 150454, 150686, 151343, 151961, 152119, 153791, 154328, 154513, 154639, 155049, 155114, 158040, 158895, 191284, 192272, 192698, 193706, 132370, 136968, 139284, 159167, 159403, 178748, 180149 and 180153, or the complement thereof.

75. A method of screening for an agent that modulates a biological event characteristic of Alzheimer's disease (AD) in a subject, comprising:
(a) combining a candidate agent with a cell and/or transgenic animal comprising a transgenic nucleic acid comprising an LIPA gene, or a portion thereof, containing one or more polymorphisms or allelic variants, wherein when the transgenic nucleic acid is expressed the transgenic animal develops one or more characteristics of Alzheimer's disease; and
(b) determining the effect of the agent upon one or more characteristics of Alzheimer's disease.

76. The method of claim 75, wherein the LIPA allelic variant comprises one or more polymorphic regions occurring at a nucleotide position corresponding to a nucleotide position selected from the group of nucleotide positions of SEQ ID NO: 468 consisting of 1197, 1307 to 1309, 1841, 1852, 2075, 6063, 6173, 6194, 7820, 25283, 28453 to 28465, 28543, 28746, 29904, 37861, 39834, 40018, 7219, 8242, 10114, 10606, 10688, 10729, 11559, 12031, 14497, 14729, 21145, 21329, 21404, 21429, 22246, 22354, 22621, 23802 and 25969, or the complement thereof.

77. A method of screening for an agent that modulates a biological event characteristic of Alzheimer's disease (AD) in a subject, comprising:
(a) combining a candidate agent with a cell and/or transgenic animal comprising a transgenic nucleic acid comprising an TNFRSF6 gene, or a portion thereof, containing one or more polymorphisms or allelic variants, wherein when the transgenic nucleic acid is expressed the transgenic animal develops one or more characteristics of Alzheimer's disease; and
(b) determining the effect of the agent upon one or more characteristics of Alzheimer's disease.

78. The method of claim 77, wherein the TNFRSF6 allelic variant comprises one or more polymorphic regions occurring at a nucleotide position corresponding to a nucleotide position selected from the group of nucleotide positions of SEQ ID NO: 403 consisting of 1530, 1550, 14525, 14714, 18982, 19069, 20412, 20552, 23199, 23416, 24890, 26359, 199, 213, 843, 2967, 3103, 5335, 5345, 6074, 9374, 9907, 9936, 10937, 11200, 11279, 11359, 11503, 11511, 11587, 11694, 11905, 12193, 12208, 12238, 18511, 18567, 20640, 21585, 22439, 25081, 26878, 27670, 1926, 2269, 18934, 19227 and 22026, or the complement thereof.

79. A method of screening for biologically active agents that modulate the expression or activity of a SNCG protein, comprising:
combining a candidate agent with a cell comprising a nucleotide sequence which is an allelic variant of the SNCG gene, wherein said allelic variant comprises one or more polymorphic regions occurring at a nucleotide position corresponding to a nucleotide position selected from the group of nucleotide positions of SEQ ID NO: 73 consisting of 560, 590, 617, 645, 915, 987, 1723, 1943, 1950, 3151, 3178, 3189, 3284, 3779, 4156, 4276, 4311, 4552, 4976, 4995, 5019, 5025, 5112, 5136, 5517, 5421, 5648, 2533, 3371, 4627, 4727, 4813 and 5200, or the complement thereof, and operably linked to a promoter such that the nucleotide sequence is expressed as a SNCG protein in the cell; and
determining the effect of the agent upon the expression and/or activity of the SNCG protein.

80. A method of screening for biologically active agents that modulate the expression or activity of a IDE protein, comprising:
combining a candidate agent with a cell comprising a nucleotide sequence which is an allelic variant of the IDE gene, wherein said allelic variant comprises one or more polymorphic regions occurring at a nucleotide position corresponding to a nucleotide position selected from the group of nucleotide positions of SEQ ID NO: 187 consisting of 2456, 3279, 3407, 42943, 62498, 69586, 107395, 112114, 116662, 17095, 17242, 33590, 38903, 43391, 45017, 68906, 68973, 73772, 74084, 83024, 83104, 89301, 105060, 108489, 111914, 113142, 113591, 114683, 117803 and 124565, or the complement thereof; or of SEQ ID NO: 484 consisting of 820, 7066, 11758, 21270, 22225, 29294, 33452, 33708, 36982, 54862, 77786, 80594, 84792, 84997, 86682, 86857, 88511, 90437, 90593, 91650, 91870, 91878, 92011, 93618, 94344, 94714, 95671, 96324, 97302, 97370, 98253, 98276, 98385, 98646, 98814, 99597, 100378, 101029, 101265, 102465, 103289, 103967, 105793, 106076, 106453, 106600, 106995, 107851, 108434, 109096, 109399, 109483, 110870, 111189, 111972, 112627, 112629, 112631, 113407, 114444, 114482, 115473, 116681, 117226, 117600, 117802, 118223, 120011, 122260, 123165, 123424, 124352, 124501, 124692, 125113, 125159, 126568, 127166, 127598, 127600, 127609, 127614, 127623, 127662, 128053, 128261, 128289, 128291, 128393, 129444, 6078, 7106, 11758, 18267, 19581, 30078, 54862, 73841, 83448, 80304, 98276, 117802 and 129124, or the complement thereof, and operably linked to a promoter such that the nucleotide sequence is expressed as a IDE protein in the cell; and
determining the effect of the agent upon the expression and/or activity of the IDE protein.

81. A method of screening for biologically active agents that modulate the expression or activity of a KNSL1 protein, comprising:
combining a candidate agent with a cell comprising a nucleotide sequence which is an allelic variant of the KNSL1 gene, wherein said allelic variant comprises one or more polymorphic regions occurring at a nucleotide position corresponding to a nucleotide position selected from the group of nucleotide positions of SEQ ID NO: 348 consisting of 300, 1152, 14235, 15104, 20815, 35719, 36738-36739, 41015, 42125, 45083, 45887, 56706, 56887, 58524, 62661 and 63802, or the complement thereof; or of SEQ ID NO: 484 consisting of 130876, 131378, 131616, 131620, 131688, 131998, 132004, 132370, 132697, 132968, 133355, 133806, 134030, 134291, 134661, 137087, 137142, 138396, 140665, 140736, 141173, 142056, 142777, 143025, 143729, 144484, 146181, 147051, 147322, 147707, 147842, 148080, 149026, 149044, 149389, 150003, 150384, 150454, 150686, 151343, 151961, 152119, 153791, 154328, 154513, 154639, 155049, 155114, 158040, 158895, 191284, 192272, 192698, 193706, 132370, 136968, 139284, 159167, 159403, 178748, 180149 and 180153, or the complement thereof, and operably linked to a promoter such that the nucleotide sequence is expressed as a KNSL1 protein in the cell; and
determining the effect of the agent upon the expression and/or activity of the KNSL1 protein.

82. A method of screening for biologically active agents that modulate the expression or activity of a LIPA protein, comprising:
combining a candidate agent with a cell comprising a nucleotide sequence which is an allelic variant of the LIPA gene, wherein said allelic variant comprises one or more polymorphic regions occurring at a nucleotide position corresponding to a nucleotide position selected from the group of nucleotide positions of SEQ ID NO: 468 consisting of 1197, 1307-1309, 1841, 1852, 2075, 6063, 6173, 6194, 7820, 25283, 28453-28465, 28543, 28746, 29904, 37861, 39834, 40018, 7219, 8242, 10114, 10606, 10688, 10729, 11559, 12031, 14497, 14729, 21145, 21329, 21404, 21429, 22246, 22354, 22621, 23802 and 25969, or the complement thereof, and operably linked to a promoter such that the nucleotide sequence is expressed as a LIPA protein in the cell; and
determining the effect of the agent upon the expression and/or activity of the LIPA protein.

83. A method of screening for biologically active agents that modulate the expression or activity of a TNFRSF6 protein, comprising:
combining a candidate agent with a cell comprising a nucleotide sequence which is an allelic variant of the TNFRSF6 gene, wherein said allelic variant comprises one or more polymorphic regions occurring at a nucleotide position corresponding to a nucleotide position selected from the group of nucleotide positions of SEQ ID NO: 403 consisting of 1530, 1550, 14525, 14714, 18982, 19069, 20412, 20552, 23199, 23416, 24890, 26359, 199, 213, 843, 2967, 3103, 5335, 5345, 6074, 9374, 9907, 9936, 10937, 11200, 11279, 11359, 11503, 11511, 11587, 11694, 11905, 12193, 12208, 12238, 18511, 18567, 20640, 21585, 22439, 25081, 26878, 27670, 1926, 2269, 18934, 19227 and 22026, or the complement thereof, and operably linked to a promoter such that the nucleotide sequence is expressed as a TNFRSF6 protein in the cell; and
determining the effect of the agent upon the expression and/or activity of the TNFRSF6 protein.

84. An isolated nucleic acid encoding a SNCG protein, comprising SEQ ID NO: 469, wherein the nucleotide at position 672 is not T.

85. The nucleic acid of claim 84, wherein the nucleotide at position 672 is A.

86. An isolated nucleic acid encoding an IDE protein, comprising SEQ ID NO: 470, wherein the nucleotide at position 7 is not C.

87. The nucleic acid of claim 86, wherein the nucleotide at position 7 is T.

88. An isolated nucleic acid encoding a KNSL1 polymorphic protein, comprising a nucleic acid selected from the group consisting of:
SEQ ID NO: 471, wherein the nucleotide at position 2747 is not C;
SEQ ID NO: 473, wherein the nucleotide at position 2610 is not C; and
SEQ ID NO: 475, wherein the nucleotide at position 2695 is not C.

89. The nucleic acid of claim 88, wherein the nucleotide at position 2747 of SEQ ID NO: 471 is T.

90. The nucleic acid of claim 88, wherein the nucleotide at position 2619 of SEQ ID NO: 473 is T.

91. The nucleic acid of claim 88, wherein the nucleotide at position 2695 of SEQ ID NO: 475 is T.

92. An isolated nucleic acid encoding a TNFRSF6 protein, comprising a nucleic acid selected from the group consisting of:
SEQ ID NO: 477, wherein the nucleotide at position 208 is not G;
SEQ ID NO: 478, wherein the nucleotide at position 377 is not G;
SEQ ID NO: 479, wherein the nucleotide at position 403 is not G;
SEQ ID NO: 480, wherein the nucleotide at position 208 is not G; and
SEQ ID NO: 481, wherein the nucleotide at position 208 is not G.

93. The nucleic acid of claim 92, wherein the nucleotide at position 208 of SEQ ID NO: 477 is A.

94. The nucleic acid of claim 92, wherein the nucleotide at position 377 of SEQ ID NO: 478 is A.

95. The nucleic acid of claim 92, wherein the nucleotide at position 403 of SEQ ID NO: 479 is A.

96. The nucleic acid of claim 92, wherein the nucleotide at position 208 of SEQ ID NO: 480 is A.

97. The nucleic acid of claim 92, wherein the nucleotide at position 208 of SEQ ID NO: 481 is A.

98. An isolated nucleic acid encoding a LIPA protein, comprising SEQ ID NO: 482, wherein the nucleotide at position 2333 is not C.

99. The nucleic acid of claim 98, wherein the nucleotide at position 2333 is T.

100. An isolated KNSL1 polymorphic protein, comprising an amino acid sequence selected from the group consisting of:
SEQ ID NO: 472, SEQ ID NO: 474, and SEQ ID NO: 476.

101. An antibody specific against the KNSL1 polymorphic protein of claim 100.

102. A method for detecting an altered level of risk for neurodegenerative disease in a subject, comprising:
the step of detecting in a target nucleic acid obtained from the subject the presence of an allelic variant of one or more polymorphic regions of one or more genes selected from the group consisting of uPA, SNCG, IDE, KNSL1, LIPA and TNFRSF6, wherein the presence of at least one of said allelic variant of one or more polymorphic regions is indicative of an altered level of risk for the neurodegenerative disease compared to a subject not having said allelic variant.

103. The method of claim 102, wherein the neurodegenerative disease is Alzheimer's disease.

104. The method of claim 102, wherein the gene is SNCG.

105. The method of claim 102, wherein the gene is IDE.

106. The method of claim 102, wherein the gene is KNSL.

107. The method of claim 102, wherein the gene is LIPA.

108. The method of claim 102, wherein the gene is TNFRSF6.

109. The method of claim 104, wherein the one or more polymorphic regions occurs at a nucleotide position corresponding to a nucleotide position selected from the group of nucleotide positions of SEQ ID NO: 73 consisting of 560, 590, 617, 645, 915, 987, 1723, 1943, 1950, 3151, 3178, 3189, 3284, 3779, 4156, 4276, 4311, 4552, 4976, 4995, 5019, 5025, 5112, 5136, 5517, 2533, 3371, 4627, 4727, 4813 and 5200, or the complement thereof.

110. The method of claim 105, wherein the one or more polymorphic regions occurs at a nucleotide position corresponding to a nucleotide position selected from the group of nucleotide positions of SEQ ID NO: 187 consisting of 2456, 3279, 3407, 42943, 62498, 69586, 107395, 112114, and 116662, or the complement thereof; or of SEQ ID NO: 484 consisting of 820, 7066, 11758, 21270, 22225, 29294, 33452, 33708, 36982, 54862, 77786, 80594, 84792, 84997, 86682, 86857, 88511, 90437, 90593, 91650, 91870, 91878, 92011, 93618, 94344, 94714, 95671, 96324, 97302, 97370, 98253, 98276, 98385, 98646, 98814, 99597, 100378, 101029, 101265, 102465, 103289, 103967, 105793, 106076, 106453, 106600, 106995, 107851, 108434, 109096, 109399, 109483, 110870, 111189, 111972, 112627, 112629, 112631, 113407, 114444, 114482, 115473, 116681, 117226, 117600, 117802, 118223, 120011, 122260, 123165, 123424, 124352, 124501, 124692, 125113, 125159, 126568, 127166, 127598, 127600, 127609, 127614, 127623, 127662, 128053, 128261, 128289, 128291, 128393, 129444, or the complement thereof.

111. The method of claim 106, wherein the one or more polymorphic regions occurs at a nucleotide position corresponding to a nucleotide position selected from the group of nucleotide positions of SEQ ID NO: 348 consisting of 300, 1152, 14235, 15104, 20815, 35719, 36738-36739, 41015, 42125, 45083, 45887, 56706, 56887, 58524, 62661 and 63802, or the complement thereof; or of SEQ ID NO: 484 consisting of 130876, 131378, 131616, 131620, 131688, 131998, 132004, 132370, 132697, 132968, 133355, 133806, 134030, 134291, 134661, 137087, 137142, 138396, 140665, 140736, 141173, 142056, 142777, 143025, 143729, 144484, 146181, 147051, 147322, 147707, 147842, 148080, 149026, 149044, 149389, 150003, 150384, 150454, 150686, 151343, 151961, 152119, 153791, 154328, 154513, 154639, 155049, 155114, 158040, 158895, 191284, 192272, 192698, 193706, or the complement thereof.

112. The method of claim 107, wherein the one or more polymorphic regions occurs at a nucleotide position corresponding to a nucleotide position selected from the group of nucleotide positions of SEQ ID NO: 468 consisting of 1197, 1307-1309, 1841, 1852, 2075, 6063, 6173, 6194, 7820, 25283, 28453-28465, 28543, 28746, 29904, 37861, 39834, and 40018, or the complement thereof.

113. The method of claim 108, wherein the one or more polymorphic regions occurs at a nucleotide position corresponding to a nucleotide position selected from the group of nucleotide positions of SEQ ID NO: 403 consisting of 1530, 1550, 14525, 14714, 18982, 19069, 20412, 20552, 23199, 23416, 24890, 26359, 1926, 2269, 18934, 19227 and 22026, or the complement thereof.

114. The method of claim 9 or 110, wherein the one or more polymorphic regions of the IDE gene is a haplotype comprising particular allelic variants at nucleotides 2456, 3279, 3407 and 42943 of SEQ ID NO: 187.

115. The method of claim 9, wherein the one or more polymorphic regions of the IDE gene is a SNP corresponding to nucleotide 112114 of SEQ ID NO: 187, wherein the allelic variant is A.

116. The method of claims 3, 40 or 104, wherein the one or more polymorphic regions of the SNCG gene occurs at a nucleotide position corresponding to a nucleotide position selected from the group of nucleotide positions of SEQ ID NO: 73 consisting of 5421 and 5648, or the complement thereof.

117. The method of claims 4, 41 or 105, wherein the one or more polymorphic regions of the IDE gene occurs at a nucleotide position corresponding to a nucleotide position selected from the group of nucleotide positions of SEQ ID NO: 187 consisting of 17095, 17242, 33590, 38903, 43391, 45017, 68906, 68973, 73772, 74084, 83024, 83104, 89301, 105060, 108489, 111914, 113142, 113591, 114683, 117803 and 124565, or the complement thereof; or of SEQ ID NO: 484 consisting of 6078, 7106, 11758, 18267, 19581, 30078, 54862, 73841, 83448, 80304, 98276, 117802, 129124, or the complement thereof.

118. The method of claims 5, 42 or 106, wherein the one or more polymorphic regions of the KNSL1 gene occurs at a nucleotide position corresponding to a nucleotide position selected from the group of nucleotide positions of SEQ ID NO: 484 consisting of 132370, 136968, 139284, 159167, 159403, 178748, 180149, 180153, or the complement thereof.

119. The method of claims 6, 43 or 107, wherein the one or more polymorphic regions of the LIPA gene occurs at a nucleotide position corresponding to a nucleotide position selected from the group of nucleotide positions of SEQ ID NO: 468 consisting of 7219, 8242, 10114, 10606, 10688, 10729, 11559, 12031, 14497, 14729, 21145, 21329, 21404, 21429, 22246, 22354, 22621, 23802 and 25969, or the complement thereof.

120. The method of any one of claims 7, 44 or 108, wherein the one or more polymorphic regions of the TNFRSF6 gene occurs at a nucleotide position corresponding to a nucleotide position selected from the group of nucleotide positions of SEQ ID NO: 403 consisting of 199, 213, 843, 2967, 3103, 5335, 5345, 6074, 9374, 9907, 9936, 10937, 11200, 11279, 11359, 11503, 11511, 11587, 11694, 11905, 12193, 12208, 12238, 18511, 18567, 20640, 21585, 22439, 25081, 26878 and 27670, or the complement thereof.

121. A method of treating a subject manifesting an Alzheimer's disease phenotype, comprising:
detecting in nucleic acid obtained from the subject the presence or absence of an allelic variant of one or more polymorphic regions of one or more genes selected from the group consisting of uPA, SNCG, IDE, KNSL1, LIPA and TNFRSF6, wherein the presence of at least one of said allelic variant of one or more polymorphic regions is indicative of the occurrence of Alzheimer's disease in a subject; and
selecting and administering a treatment that is effective for treatment of Alzheimer's disease.

122. The method of claim 121, wherein the gene is SNCG.

123. The method of claim 121, wherein the gene is IDE.

124. The method of claim 121, wherein the gene is KNSL.

125. The method of claim 121, wherein the gene is LIPA.

126. The method of claim 121, wherein the gene is TNFRSF6.

127. The method of claim 122, wherein the one or more polymorphic regions of the SNCG occurs at a nucleotide position corresponding to a nucleotide position selected from the group of nucleotide positions of SEQ ID NO: 73 consisting of 560, 590, 617, 645, 915, 987, 1723, 1943, 1950, 3151, 3178, 3189, 3284, 3779, 4156, 4276, 4311,4552,4976, 4995, 5019, 5025, 5112, 5136, 5517, 5421, 5648, 2533, 3371, 4627, 4727, 4813 and 5200, or the complement thereof.

128. The method of claim 123, wherein the one or more polymorphic regions of the IDE gene occurs at a nucleotide position corresponding to a nucleotide position selected from the group of nucleotide positions of SEQ ID NO: 187 consisting of 2456, 3279, 3407, 42943, 62498, 69586, 107395, 112114, 116662, 17095, 17242, 33590, 38903, 43391, 45017, 68906, 68973, 73772, 74084, 83024, 83104, 89301, 105060, 108489, 111914, 113142, 113591, 114683, 117803 and 124565, or the complement thereof; or of SEQ ID NO: 484 consisting of 820, 7066, 11758, 21270, 22225, 29294, 33452, 33708, 36982, 54862, 77786, 80594, 84792, 84997, 86682, 86857, 88511, 90437, 90593, 91650, 91870, 91878, 92011, 93618, 94344, 94714, 95671, 96324, 97302, 97370, 98253, 98276, 98385, 98646, 98814, 99597, 100378, 101029, 101265, 102465, 103289, 103967, 105793, 106076, 106453, 106600, 106995, 107851, 108434, 109096, 109399, 109483, 110870, 111189, 111972, 112627, 112629, 112631, 113407, 114444, 114482, 115473, 116681, 117226, 117600, 117802, 118223, 120011, 122260, 123165, 123424, 124352, 124501, 124692, 125113, 125159, 126568, 127166, 127598, 127600, 127609, 127614, 127623, 127662, 128053, 128261, 128289, 128291, 128393, 129444, 6078, 7106, 11758, 18267, 19581, 30078, 54862, 73841, 83448, 80304, 98276, 117802 and 129124, or the complement thereof.

129. The method of claim 124, wherein the one or more polymorphic regions of the KNSL1 gene occurs at a nucleotide position corresponding to a nucleotide position selected from the group of nucleotide positions of SEQ ID NO: 348 consisting of 300, 1152, 14235, 15104, 20815, 35719, 36738-36739, 41015, 42125, 45083, 45887, 56706, 56887, 58524, 62661 and 63802, or the complement thereof; or of SEQ ID NO: 484 consisting of 130876, 131378, 131616, 131620, 131688, 131998, 132004, 132370, 132697, 132968, 133355, 133806, 134030, 134291, 134661, 137087, 137142, 138396, 140665, 140736, 141173, 142056, 142777, 143025, 143729, 144484, 146181, 147051, 147322, 147707, 147842, 148080, 149026, 149044, 149389, 150003, 150384, 150454, 150686, 151343, 151961, 152119, 153791, 154328, 154513, 154639, 155049, 155114, 158040, 158895, 191284, 192272, 192698, 193706, 132370, 136968, 139284, 159167, 159403, 178748, 180149 and 180153, or the complement thereof.

130. The method of claim 125, wherein the one or more polymorphic regions of the LIPA gene occurs at a nucleotide position corresponding to a nucleotide position selected from the group of nucleotide positions of SEQ ID NO: 468 consisting of 1197, 1307 to 1309, 1841, 1852, 2075, 6063, 6173, 6194, 7820, 25283, 28453 to 28465, 28543, 28746, 29904, 37861, 39834, 40018, 7219, 8242, 10114, 10606, 10688, 10729, 11559, 12031, 14497, 14729, 21145, 21329, 21404, 21429, 22246, 22354, 22621, 23802 and 25969, or the complement thereof.

131. The method of claim 126, wherein the one or more polymorphic regions of the TNFRSF6 gene occurs at a nucleotide position corresponding to a nucleotide position selected from the group of nucleotide positions of SEQ ID NO: 403 consisting of 1530, 1550, 14525, 14714, 18982, 19069, 20412, 20552, 23199, 23416, 24890, 26359, 199, 213, 843, 2967, 3103, 5335, 5345, 6074, 9374, 9907, 9936, 10937, 11200, 11279, 11359, 11503, 11511, 11587, 11694, 11905, 12193, 12208, 12238, 18511, 18567, 20640, 21585, 22439, 25081, 26878, 27670, 1926, 2269, 18934, 19227 and 22026, or the complement thereof.

132. The method of claim 114, wherein the nucleotide in IDE at position 2456 of SEQ ID NO: 187 is G, at position 3279 of SEQ ID NO: 187 is T, at position 3407 of SEQ ID NO: 187 is T, and at position 42943 of SEQ ID NO: 187 is T.

133. The method of claim 114, wherein the nucleotide in IDE at position 2456 of SEQ ID NO: 187 is T, at position 3279 of SEQ ID NO: 187 is T, at position 3407 of SEQ ID NO: 187 is C, and at position 42943 of SEQ ID NO: 187 is T.

134. The method of claim 114, wherein the nucleotide in IDE at position 2456 of SEQ ID NO: 187 is T, at position 3279 of SEQ ID NO: 187 is T, at position 3407 of SEQ ID NO: 187 is C, and at position 42943 of SEQ ID NO: 187 is C.

135. The method of claim 114, wherein the nucleotide in IDE at position 2456 of SEQ ID NO: 187 is T, at position 3279 of SEQ ID NO: 187 is C, at position 3407 of SEQ ID NO: 187 is C, and at position 42943 of SEQ ID NO: 187 is C.

136. The method of claim 112, wherein the one or more polymorphic regions of the LIPA gene is a haplotype comprising particular allelic variants at nucleotides 1852, 6063 and 7820 of SEQ ID NO: 468.

137. The method of claim 136, wherein the nucleotide in LIPA at position 1852 of SEQ ID NO: 468 is A, at position 6063 of SEQ ID NO: 468 is G, and at position 7820 of SEQ ID NO: 468 is C, and this haplotype is indicative of protection against Alzheimer's disease.

138. The method of claim 10 or 111, wherein the one or more polymorphic regions of the KNSL1 gene is a haplotype comprising particular allelic variants at nucleotides 132370, 133355, 147842 and 178981 of SEQ ID NO: 484.

139. The method of claim 138, wherein the nucleotide in KNSL1 at position 132370 of SEQ ID NO: 484 is A; between positions 133354-133355 of SEQ ID NO: 484 is a 6, 7 or 8 base pair poly-T insertion corresponding to -TTTTTT(T)(T)-; at positions 147842-147845 of SEQ ID NO: 484 is the 4 base pair insertion corresponding to -AGTT-; and between positions 178980-178981 of SEQ ID NO: 484 is the 5 base pair insertion corresponding to -AATTT-.

140. The method of claim 139, wherein the poly-T insertion is 6 base pairs corresponding to -TTTTTT-.

141. The method of claim 139, wherein the poly-T insertion is 7 base pairs corresponding to -TTTTTTT-.

142. The method of claim 139, wherein the poly-T insertion is 8 base pairs corresponding to -TTTTTTTT-.

143. The method of claims 1, 38, 102, and 121, wherein the one or more polymorphisms occur at nucleotide positions corresponding to nucleotide positions selected from the group of uPA nucleotide positions of SEQ ID NO: 559 or 560 consisting of 9, 401, 464, 515, 748, 1229, 1356, 1752, 1942, 2127, 2543, 3029, 3169, 3799, 3947, 4808, 5287, 6532, 178, 1363, 1423, 1465, 1540, 2297, 2445, 2653, 3080, 3546, 3664, 3816, 4320, 4369, 4399, 4851, 5186, 5204, 5787, 6519, 6909, 7235, 7848, 7908, and the complementary positions thereof; and positions of SEQ ID NO: 563 consisting of 79, 93, 256, 385 and 714, and the complementary positions thereof.

144. The method of claim 143, wherein the nucleotide in SEQ ID NO: 559: at position 9 is A or C, at position 401 is G or A, at position 464 is G or position 464 is deleted, at position 515 is C or T, at position 748 is G or T, at position 1229 is T or G, at position 1356 is C or T, at position 1752 is T or C, at position 1942 is G or A, at position 2127 is G or A, at position 2543 is G or A, at position 3029 is G or A, at position 3169 is C or T, at position 3799 is T or C, at position 3947 is C or T, at position 4808 is C or T, at position 5287 is T or C, and at position 6532 is T or C, and the complements thereof; and the nucleotide in SEQ ID NO: 563: at position 79 is T or C, at position 93 is a C or position 93 is deleted, at position 256 is G or T, at position 385 is C or T, at position 714-715 is the dinulceotide -GT- or the -GT- dinucleotide is deleted.

145. The method of claim 143, wherein the nucleotide at position 178 is A or G, at position 1363 is C or A, at position 1423 is G or T, at position 1465 is C or A, at position 1540 is C or T, at position 2297 is C or T, at position 2445 is T or G, at position 2653 is G or A, at position 3080 is G or A, at position 3546 is C or G, at position 3664 is C or T, at position 3816 is A or C, at position 4320 is T or C, at position 4369 is G or A, at position 4399 is C or A, at position 4851 is G or A, at position 5186 is G or A, at position 5204 is G or A, at position 5787 is C or G, at position 6519 is C or G, at position 6909 is G or T, at position 7235 is G or position 7235 is deleted, at position 7848 is C or T, and at position 7908 is A or C, and the complements thereof.

146. The method of claim 143, wherein the one or more polymorphisms occur at nucleotide positions corresponding to nucleotide positions selected from the group of nucleotide positions of SEQ ID NO: 569 or 560 consisting of 401, 515, 748 and 1752 and the complementary positions thereof; and of SEQ ID NO: 563 consisting of 93 and 714-715, and the complementary positions thereof.

147. The method of claim 143, wherein the one or more polymorphisms occur at nucleotide positions corresponding to nucleotide positions selected from the group of nucleotide positions of SEQ ID NO: 559 or 560 consisting of 9, 401, 464, 515, 748, 1229, 1356, 1752, 1942, 2127, 2543, 3029, 3169, 3799, 3947, 4808, 5287, and 6532 and the complementary positions thereof; and positions of SEQ ID NO: 563 consisting of 79, 93, 256, 385 and 714, and the complementary positions thereof.

148. The method of claim 143, wherein the one or more polymorphisms occur at nucleotide positions corresponding to nucleotide positions selected from the group of nucleotide positions of SEQ ID NO: 559 or 560 52 consisting of 401, 464, 515, 748, 1229, 1356, 1752, 1942, 2127, 2543, 3029 and 5287 and the complementary positions thereof; and positions of SEQ ID NO: 563 consisting of 79, 93, 256, 385 and 714, and the complementary positions thereof.

149. The method of claim 143, wherein the one or more polymorphisms occur at nucleotide positions corresponding to nucleotide positions selected from the group of nucleotide positions of SEQ ID NO: 559 or 560 consisting of 9, 178, 401, 464, 515, 748; and positions of SEQ ID NO: 563 consisting of 79, 93, 256, 385 and 714; and the complementary positions thereof.

150. The method of claim 143, wherein the one or more polymorphisms occur at nucleotide positions corresponding to nucleotide positions selected from the group of nucleotide positions of SEQ ID NO: 559 or 560 consisting of 401, 515 and 748; and positions of SEQ ID NO: 563 consisting of 93 and 714; and the complementary positions thereof.

151. The method of claim 143, wherein the polymorphisms occur at nucleotide positions corresponding to nucleotide positions 3169, 3947 and 6532 of SEQ ID NO: 559 or 560 and the complementary positions thereof.

152. An isolated nucleic acid molecule, comprising at least 16, 18, 20, 22, 24, 26, 28 or at least 30 contiguous nucleotides of a uPA gene; wherein the contiguous nucleotides include a sequence of 5 contiguous nucleotides of SEQ ID NO: 559 or 560, or the complement thereof, selected from the group of nucleotide sequences of SEQ ID NO: 559 or 560 consisting of:
position 397 to position 405, wherein the nucleotide at position 401 is selected from the group consisting of A, T and C;
position 511 to position 519, wherein the nucleotide at position 515 is selected from the group consisting of T, G and A;
position 744 to position 752, wherein the nucleotide at position 748 is selected from the group consisting of T, C and A; and
position 1748 to position 1756, wherein the nucleotide at position 1752 is selected from the group consisting of C, G and A; or of SEQ ID NO: 563 consisting of:
position 89 to position 97, wherein the C nucleotide at position 93 is deleted; and
position 710 to position 719, wherein the nucleotides at positions 714-715 are deleted.

153. The isolated nucleic acid molecule of claim 152, wherein at least 16 contiguous nucleotides of a uPA allele are contained in SEQ ID NOs: 559, 560 or 563.

154. A nucleic acid vector, comprising the nucleic acid molecule of claim 152.

155. A cell containing the nucleic acid vector of claim 154.

156. A primer, probe or antisense nucleic acid molecule, comprising a sequence of nucleotides that specifically hybridizes adjacent to, or at a polymorphic region of, a uPA allele spanning a nucleotide position of SEQ ID NO: 559 or 560, or the complement thereof, selected from the group consisting of nucleotide positions 9, 401, 464, 515, 748, 1229, 1356, 1752, 1942, 2127, 2543, 3029, 3169, 3799, 3947, 4808, 5287, 6532, 178, 1363, 1423, 1465, 1540, 2297, 2445, 2653, 3080, 3546, 3664, 3816, 4320, 4369, 4399, 4851, 5186, 5204, 5787, 6519, 6909, 7235, 7848, 7908 and 58524; or spanning a nucleotide position of SEQ ID NO: 563, or the complement thereof, selected from the group consisting of nucleotide positions 79, 93, 256, 385 and 714.

157. A method of screening for an agent that modulates a biological event characteristic of Alzheimer's disease (AD) in a subject, comprising:
(a) combining a candidate agent with a cell and/or transgenic animal comprising a transgenic nucleic acid comprising an uPA gene, or a portion thereof, containing one or more polymorphisms or allelic variants, wherein when the transgenic nucleic acid is expressed the transgenic animal develops one or more characteristics of Alzheimer's disease; and
(b) determining the effect of the agent upon one or more characteristics of Alzheimer's disease.

158. The method of claim 157, wherein the uPA allelic variant comprises one or more polymorphic regions occurring at a nucleotide position corresponding to a nucleotide position selected from the group of uPA nucleotide positions of SEQ ID NO: 559 or 560 consisting of 9, 401, 464, 515, 748, 1229, 1356, 1752, 1942, 2127, 2543, 3029, 3169, 3799, 3947, 4808, 5287, 6532, 178, 1363, 1423, 1465, 1540, 2297, 2445, 2653, 3080, 3546, 3664, 3816, 4320, 4369, 4399, 4851, 5186, 5204, 5787, 6519, 6909, 7235, 7848, 7908, or the complement thereof; and positions of SEQ ID NO: 563 consisting of 79, 93, 256, 385 and 714, or the complement thereof.

159. A method of screening for biologically active agents that modulate the expression or activity of a uPA protein, comprising:
combining a candidate agent with a cell comprising a nucleotide sequence which is an allelic variant of the uPA gene, wherein said allelic variant comprises one or more polymorphic regions occurring at a nucleotide position corresponding to a nucleotide position selected from the group of uPA nucleotide positions of SEQ ID NO: 559 or 560 consisting of 9, 401, 464, 515, 748, 1229, 1356, 1752, 1942, 2127, 2543, 3029, 3169, 3799, 3947, 4808, 5287, 6532, 178, 1363, 1423, 1465, 1540, 2297, 2445, 2653, 3080, 3546, 3664, 3816, 4320, 4369, 4399, 4851, 5186, 5204, 5787, 6519, 6909, 7235, 7848, 7908, or the complement thereof; and positions of SEQ ID NO: 563 consisting of 79, 93, 256, 385 and 714, or the complement thereof, and operably linked to a promoter such that the nucleotide sequence is expressed as a uPA protein in the cell; and
determining the effect of the agent upon the expression and/or activity of the uPA protein.

160. The method of claims 1, 38, 102, and 121, wherein the one or more polymorphic regions or polymorphisms of the uPA gene is a haplotype comprising particular allelic variants at nucleotides 3169, 3947 and 6532 of SEQ ID NO: 560.

161. The method of claim 160, wherein the nucleotide in position 3169 of SEQ ID NO: 560 is T, at position 3947 of SEQ ID NO: 560 is C, and at position 6532 of SEQ ID NO: 560 is T, and this haplotype is indicative of protection against Alzheimer's disease.

162. A computer assisted method of identifying a proposed treatment for a neurodegenerative disease, comprising the computer assisted steps of:
(a) storing a database of biological data for a plurality of patients, the biological data including for each of said plurality of patients (i) a treatment type, (ii) the presence or absence of an allelic variant of one or more polymorphic regions of one or more genes selected from the group consisting of uPA, SNCG, IDE, KNSL1, LIPA and TNFRSF6 associated with the neurodegenerative disease, and (iii) at least one disease progression measure for the neurodegenerative disease from which treatment efficacy may be determined; and then
(b) querying said database to determine the dependence on said allelic variant of the effectiveness of a treatment type in treating the degenerative disease, to thereby identify a proposed treatment as an effective treatment for a patient carrying a particular polymorphism for the neurodegenerative disease.

163. The method according to claim 162, wherein the allelic variant is associated with the phenotype of the neurodegenerative disease, and wherein the polymorphic region, or complements thereof, is selected from the group consisting of:
uPA nucleotide positions 9, 401, 464, 515, 748, 1229, 1356, 1752, 1942, 2127, 2543, 3029, 3169, 3799, 3947, 4808, 5287, 6532, 178, 1363, 1423, 1465, 1540, 2297, 2445, 2653, 3080, 3546, 3664, 3816, 4320, 4369, 4399, 4851, 5186, 5204, 5787, 6519, 6909, 7235, 7848, 7908 of SEQ ID NO: 559 or 560; and uPA nucleotide positions of SEQ ID NO: 563 consisting of 79, 93, 256, 385 and 714 of SEQ ID NO: 563;
SNCG nucleotide positions 560, 590, 617, 645, 915, 987, 1723, 1943, 1950, 3151, 3178, 3189, 3284, 3779, 4156, 4276, 4311, 4552, 4976, 4995, 5019, 5025, 5112, 5136, 5517, 5421, 5648, 2533, 3371, 4627, 4727, 4813 and 5200 of SEQ ID NO:73;
IDE nucleotide positions 2456, 3279, 3407, 42943, 62498, 69586, 107395, 112114, 116662, 17095, 17242, 33590, 38903, 43391, 45017, 68906, 68973, 73772, 74084, 83024, 83104, 89301, 105060, 108489, 111914, 113142, 113591, 114683, 117803 and 124565 of SEQ ID NO: 187; the complement of IDE nucleotide positions 820, 7066, 11758, 21270, 22225, 29294, 33452, 33708, 36982, 54862, 77786, 80594, 84792, 84997, 86682, 86857, 88511, 90437, 90593, 91650, 91870, 91878, 92011, 93618, 94344, 94714, 95671, 96324, 97302, 97370, 98253, 98276, 98385, 98646, 98814, 99597, 100378, 101029, 101265, 102465, 103289, 103967, 105793, 106076, 106453, 106600, 106995, 107851, 108434, 109096, 109399, 109483, 110870, 111189, 111972, 112627, 112629, 112631, 113407, 114444, 114482, 115473, 116681, 117226, 117600, 117802, 118223, 120011, 122260, 123165, 123424, 124352, 124501, 124692, 125113, 125159, 126568, 127166, 127598, 127600, 127609, 127614, 127623, 127662, 128053, 128261, 128289, 128291, 128393, 129444, 6078, 7106, 11758, 18267, 19581, 30078, 54862, 73841, 83448, 80304, 98276, 117802 and 129124 of SEQ ID NO: 484;
KNSL1 nucleotide positions 300, 1152, 14235, 15104, 20815, 35719, 36738-36739, 41015, 42125, 45083, 45887, 56706, 56887, 58524, 62661 and 63802 of SEQ ID NO: 348; KNSL1 nucleotide positions 130876, 131378, 131616, 131620, 131688, 131998, 132004, 132370, 132697, 132968, 133355, 133806, 134030, 134291, 134661, 137087, 137142, 138396, 140665, 140736, 141173, 142056, 142777, 143025, 143729, 144484, 146181, 147051, 147322, 147707, 147842, 148080, 149026, 149044, 149389, 150003, 150384, 150454, 150686, 151343, 151961, 152119, 153791, 154328, 154513, 154639, 155049, 155114, 158040, 158895, 191284, 192272, 192698, 193706, 132370, 136968, 139284, 159167, 159403, 178748, 180149 and 180153 of SEQ ID NO: 484;
LIPA nucleotide positions 1197, 1307 to 1309, 1841, 1852, 2075, 6063, 6173, 6194, 7820, 25283, 28453 to 28465, 28543, 28746, 29904, 37861, 39834,40018, 7219,8242, 10114, 10606, 10688, 10729, 11559, 12031, 14497, 14729, 21145, 21329, 21404, 21429, 22246, 22354, 22621, 23802 and 25969 of SEQ ID NO: 468; and
TNFRSF6 nucleotide positions 1530, 1550, 14525, 14714, 18982, 19069, 20412, 20552, 23199, 23416, 24890, 26359, 199, 213, 843, 2967, 3103, 5335, 5345, 6074, 9374, 9907, 9936, 10937, 11200, 11279, 11359, 11503, 11511, 11587, 11694, 11905, 12193, 12208, 12238, 18511, 18567, 20640, 21585, 22439, 25081, 26878, 27670, 1926, 2269, 18934, 19227 and 22026 of SEQ ID NO: 403; and
polymorphic regions within 2 centimorgans thereof.

164. The method of claim 162, wherein the neurodegenerative disease is Alzheimer's Disease.

165. The method according to claim 162, wherein treatment type is selected from the group consisting of control treatments and experimental treatments.

166. The method according to claim 162, wherein said database includes a plurality of patients having control treatments and a plurality of patients having experimental treatments.

167. The method according to claim 164, wherein said control treatment is selected from the group consisting of placebo treatments and treatments with a known treatment for Alzheimer's Disease.

168. The method according to claim 164, wherein said database includes a plurality of patients having control treatments with a placebo, a plurality of patients having control treatments with a known treatment for Alzheimer's Disease, and a plurality of patients having experimental treatments.

169. The method according to claim 162, wherein said at least one disease progression measure is selected from the group consisting of tremor measures, rigidity measures, and akinesia measures.

170. The method according to claim 162, wherein said biological data for each of said plurality of patients includes at least three distinct polymorphic polymorphic regions associated with the neurodegenerative disease.

171. The method according to claim 164, wherein said biological data for each of said plurality of patients includes at least five distinct polymorphic regions associated with the neurodegenerative disease.

172. The method according to claim 164, wherein said biological data for each of said plurality of patients includes at least ten distinct genetic polymorphisms associated with the neurodegenerative disease.

173. A method of determining a genotype of an individual, comprising determining the identity of the nucleotide(s) at a position corresponding to a nucleotide position selected from the group consisting of:
a SNCG nucleotide position of SEQ ID NO: 73, or the complement thereof, selected from the group consisting of nucleotide positions 915, 987, 2533, 3151, 3178, 3189, 3284, 3371, 3779, 4156, 4276, 4311, 4627, 4727, 4813, 5136, 5200 and 5517;
an IDE nucleotide position of SEQ ID NO: 187, or the complement thereof, selected from the group consisting of nucleotide positions 2456, 3279, 3407, 42943, 62498, 69586, 107395 and 112114; or a nucleotide position of SEQ ID NO: 484, or the complement thereof, selected from the group consisting of nucleotide positions 820, 7066, 11758, 21270, 22225, 29294, 33452, 33708, 36982, 54862, 77786, 80594, 84792, 84997, 86682, 86857, 88511, 90437, 90593, 91650, 91870, 91878, 92011, 93618, 94344, 94714, 95671, 96324, 97302, 97370, 98253, 98276, 98385, 98646, 98814, 99597, 100378, 101029, 101265, 102465, 103289, 103967, 105793, 106076, 106453, 106600, 106995, 107851, 108434, 109096, 109399, 109483, 110870, 111189, 111972, 112627, 112629, 112631, 113407, 114444, 114482, 115473, 116681, 117226, 117600, 117802, 118223, 120011, 122260, 123165, 123424, 124352, 124501, 124692, 125113, 125159, 126568, 127166, 127598, 127600, 127609, 127614, 127623, 127662, 128053, 128261, 128289, 128291, 128393, and 129444;
a KNSL1 allele spanning a nucleotide position of SEQ ID NO: 348, or the complement thereof, selected from the group consisting of nucleotide positions 300, 1152, 14235, 15104, 20815, 36738-36739, 41015, 42125, 56706, 56887 and 58524; or a nucleotide position of SEQ ID NO: 484, or the complement thereof, selected from the group consisting of nucleotide positions 130876, 131378, 131616, 131620, 131688, 131998, 132004, 132370, 132697, 132968, 133355, 133806, 134030, 134291, 134661, 137087, 137142, 138396, 140665, 140736, 141173, 142056, 142777, 143025, 143729, 144484, 146181, 147051, 147322, 147707, 147842, 148080, 149026, 149044, 149389, 150003, 150384, 150454, 150686, 151343, 151961, 152119, 153791, 154328, 154513, 154639, 155049, 155114, 158040, 158895, 191284, 192272, 192698, and 193706;
a LIPA nucleotide position of SEQ ID NO: 468, or the complement thereof, selected from the group consisting of nucleotide positions 1197, 7820, 28543 and 28746;
a TNFRSF6 nucleotide position of SEQ ID NO: 403, or the complement thereof, selected from the group consisting of nucleotide positions 1530, 14525, 14714, 19069, 20412, 20552, 23199, 23416, 1926 and 2269; and
a uPA nucleotide position of SEQ ID NO: 569 or 560, or the complement thereof, selected from the group consisting of 401, 515, 748 and 1752; and of SEQ ID NO: 563, or the complement thereof, consisting of 93 and 714-715.

The application's sequence listing, which the Patent Office published only in electronic form, follows.

SEQUENCE LISTING (564 sequences)

SEQ ID NO: 1 - DNA, 23 bp, Artificial Sequence
  Primer
ggttggctgctctcacctaacag

SEQ ID NO: 2 - DNA, 23 bp, Artificial Sequence
  Primer
gggagtaaggtctggcgaaggta

SEQ ID NO: 3 - DNA, 18 bp, Artificial Sequence
  Primer
taggaagctggggacaat

SEQ ID NO: 4 - DNA, 20 bp, Artificial Sequence
  Primer
tatgtggccctgacccctac

SEQ ID NO: 5 - DNA, 18 bp, Artificial Sequence
  Primer
ccaacctgtccctcattc

SEQ ID NO: 6 - DNA, 18 bp, Artificial Sequence
  Primer
ctggtctctgccttccta

SEQ ID NO: 7 - DNA, 18 bp, Artificial Sequence
  Primer
ccgatgcctcctattgac

SEQ ID NO: 8 - DNA, 18 bp, Artificial Sequence
  Primer
tggatgtcttcaagaagg

SEQ ID NO: 9 - DNA, 18 bp, Artificial Sequence
  Primer
tctggcgaaggtaactgg

SEQ ID NO: 10 - DNA, 24 bp, Artificial Sequence
  Primer
catcaatatttcatcggcgtcaat

SEQ ID NO: 11 - DNA, 20 bp, Artificial Sequence
  Primer
ggggtggttgtggtgattcc

SEQ ID NO: 12 - DNA, 18 bp, Artificial Sequence
  Primer
catcggcgtcaataggag

SEQ ID NO: 13 - DNA, 20 bp, Artificial Sequence
  Primer
ggcgtcaataggaggcatcg

SEQ ID NO: 14 - DNA, 18 bp, Artificial Sequence
  Primer
ttcgccagaccttactcc

SEQ ID NO: 15 - DNA, 20 bp, Artificial Sequence
  Primer
ggtgagtgcccagttacctt

SEQ ID NO: 16 - DNA, 18 bp, Artificial Sequence
  Primer
ccgaggaggccaaagaca

SEQ ID NO: 17 - DNA, 19 bp, Artificial Sequence
  Primer
ggtagccagccctgtctgc

SEQ ID NO: 18 - DNA, 18 bp, Artificial Sequence
  Primer
tccctccccagagagaag

SEQ ID NO: 19 - DNA, 18 bp, Artificial Sequence
  Primer
acacgggagcggctacag

SEQ ID NO: 20 - DNA, 18 bp, Artificial Sequence
  Primer
ggccagagctgagtcatt

SEQ ID NO: 21 - DNA, 18 bp, Artificial Sequence
  Primer
cctcagaagcagcaacag

SEQ ID NO: 22 - DNA, 18 bp, Artificial Sequence
  Primer
cctgctctctcttgtccc

SEQ ID NO: 23 - DNA, 18 bp, Artificial Sequence
  Primer
caaacacaacagaacagc

SEQ ID NO: 24 - DNA, 20 bp, Artificial Sequence
  Primer
gagctgtcagcccagacctc

SEQ ID NO: 25 - DNA, 18 bp, Artificial Sequence
  Primer
gggctcctgcatcctagt

SEQ ID NO: 26 - DNA, 18 bp, Artificial Sequence
  Primer
ctccagggcacctctgat

SEQ ID NO: 27 - DNA, 18 bp, Artificial Sequence
  Primer
cccatagtggccgagaag

SEQ ID NO: 28 - DNA, 19 bp, Artificial Sequence
  Primer
gaccaaggagcaggccaac

SEQ ID NO: 29 - DNA, 18 bp, Artificial Sequence
  Primer
gagaggactgggcaggtt

SEQ ID NO: 30 - DNA, 20 bp, Artificial Sequence
  Primer
agaggactgggcaggtctga

SEQ ID NO: 31 - DNA, 23 bp, Artificial Sequence
  Primer
tgtcctcccatagtggccgagaa

SEQ ID NO: 32 - DNA, 20 bp, Artificial Sequence
  Primer
cagcccagggaagccgacac

SEQ ID NO: 33 - DNA, 18 bp, Artificial Sequence
  Primer
aggcggcatcactccact

SEQ ID NO: 34 - DNA, 20 bp, Artificial Sequence
  Primer
gcccatctcatagacaagga

SEQ ID NO: 35 - DNA, 18 bp, Artificial Sequence
  Primer
ttccagacccgaatgcag

SEQ ID NO: 36 - DNA, 20 bp, Artificial Sequence
  Primer
ttgtctatgagatgggctcc

SEQ ID NO: 37 - DNA, 18 bp, Artificial Sequence
  Primer
gacggctctcagcactta

SEQ ID NO: 38 - DNA, 18 bp, Artificial Sequence
  Primer
gctttcttaccactaggg

SEQ ID NO: 39 - DNA, 18 bp, Artificial Sequence
  Primer
cgtgtgcggcccaatagc

SEQ ID NO: 40 - DNA, 18 bp, Artificial Sequence
  Primer
acaatgcgtaaagcagag

SEQ ID NO: 41 - DNA, 18 bp, Artificial Sequence
  Primer
agagcctcagactccacc

SEQ ID NO: 42 - DNA, 18 bp, Artificial Sequence
  Primer
ggtggcctgggctaagat

SEQ ID NO: 43 - DNA, 18 bp, Artificial Sequence
  primer
cagggaagccgacactct

SEQ ID NO: 44 - DNA, 23 bp, Artificial Sequence
  Primer
taagtggtggcctgggctaagat

SEQ ID NO: 45 - DNA, 22 bp, Artificial Sequence
  Primer
cctcgtggccttgttgtacttg

SEQ ID NO: 46 - DNA, 18 bp, Artificial Sequence
  Primer
ctgggcctccgtgttctc

SEQ ID NO: 47 - DNA, 19 bp, Artificial Sequence
  Primer
ccgctccctctcctagttc

SEQ ID NO: 48 - DNA, 18 bp, Artificial Sequence
  Primer
tggctccaagggctcact

SEQ ID NO: 49 - DNA, 18 bp, Artificial Sequence
  Primer
ctggtgacaccccaaaac

SEQ ID NO: 50 - DNA, 19 bp, Artificial Sequence
  Primer
agtgagcccttggagccac

SEQ ID NO: 51 - DNA, 18 bp, Artificial Sequence
  Primer
gtgattgccctgcactct

SEQ ID NO: 52 - DNA, 18 bp, Artificial Sequence
  Primer
tgctgtgctggcgggagt

SEQ ID NO: 53 - DNA, 18 bp, Artificial Sequence
  Primer
ccagagtgcagggcaatc

SEQ ID NO: 54 - DNA, 20 bp, Artificial Sequence
  Primer
gcaggtgctgaggccagagt

SEQ ID NO: 55 - DNA, 18 bp, Artificial Sequence
  Primer
gctcagggccttccaact

SEQ ID NO: 56 - DNA, 20 bp, Artificial Sequence
  Primer
tggggttcacatagggactc

SEQ ID NO: 57 - DNA, 18 bp, Artificial Sequence
  Primer
tggcctcagagtccctat

SEQ ID NO: 58 - DNA, 19 bp, Artificial Sequence
  Primer
actctaacccccactccac

SEQ ID NO: 59 - DNA, 18 bp, Artificial Sequence
  Primer
ggcgtgcaattcagacaa

SEQ ID NO: 60 - DNA, 23 bp, Artificial Sequence
  Primer
ctccctggcctcagagtccctat

SEQ ID NO: 61 - DNA, 22 bp, Artificial Sequence
  Primer
gccctgttcctcttgcgacact

SEQ ID NO: 62 - DNA, 18 bp, Artificial Sequence
  Primer
cgggtattgtctgaattg

SEQ ID NO: 63 - DNA, 20 bp, Artificial Sequence
  Primer
aagtacaacaaggccacgag

SEQ ID NO: 64 - DNA, 18 bp, Artificial Sequence
  Primer
gggtccctaccaaggaac

SEQ ID NO: 65 - DNA, 18 bp, Artificial Sequence
  Primer
tccaaagagaaagaggaa

SEQ ID NO: 66 - DNA, 20 bp, Artificial Sequence
  Primer
ggaagtggcagaggaggtag

SEQ ID NO: 67 - DNA, 18 bp, Artificial Sequence
  Primer
tgtagccctctagtctcc

SEQ ID NO: 68 - DNA, 18 bp, Artificial Sequence
  Primer
agactagagggctacagg

SEQ ID NO: 69 - DNA, 18 bp, Artificial Sequence
  Primer
aggagtgggctcaagttt

SEQ ID NO: 70 - DNA, 18 bp, Artificial Sequence
  Primer
gaacgggttcagcctgtt

SEQ ID NO: 71 - DNA, 18 bp, Artificial Sequence
  Primer
ggagcccagaactcacat

SEQ ID NO: 72 - DNA, 5666 bp, Homo sapiens
gatcctccttccggtttcatggcagcccagggtccagcggcatccaggatgctggtgggtagctgcacagcccaggccgcgggaggttggctgctctcacctaacaggcctatgtggccctgacccctacctaggaagctggggacaatggccaaggcgcctcccctctctgtgcctgtctgtccaggtgcagcatagacacagcacccctggggccaagagcacccagccagggctgcccccatgggtgggcagggcagtaaatgaatgagggacaggttgggaggtggccagccccctccagcccatggagggcacggggcaggagagctgggctgagccagcaggagcccagggagcctggtctctgccttcctatcctggaggaaggtgaggctgaacctccttccctccctccctccctccccgcccccactgcacgcagggctggctgggctccagctggcctccgcatcaatatttcatcggcgtcaataggaggcatcggggacagccgctgcggcagcactcgagccagctcaagcccgcagctcgcagggagatccagctccgtcctgcctgcagcagcacaaccctgcacacccaccatggatgtcttcaagaagggcttctccatcgccaaggagggcgtggtgggtgcggtggaaaagaccaagcagggggtgacggaagcagctgagaagaccaaggagggggtcatgtatgtgggtaagtggggcatggcagggtgggacagtgtggtggccaaagggtgagtgcccagttaccttcgccagaccttactccccagccccagggaggcattttgggagggggcgaggccctggctatcaaggtggggtctccagaccctggagcacccacaatgccctgtgcacacctatgtgtgtttgtctttggcctcctcggggcctctgggtgtcagagaccgcagacagggctggctacctgtctgtgcacgcacacacacattcccaagcataccagcctcccctgagcctggagcccctgaagccatgagcagcctgtgctcaggtggcccccaccctctccacacgggagcggctacagccaggtcacggatcccctccctccccagagagaaggggcaggctgggggatgaaacctaggctcagtgttccctcccccgcatcctctcctggcactctccagaggaggaaggggaggtcaagccaatgactcagctctggcccatcctgtcctgttgctgcttctgaggcccggccacacccgggcaggggctggaccctgggtctagccagtgtccctacctcaggcctgctctctcttgtcccccacattctgtcctgtccccttcccatccatccacttcttccagacacagcaggaagaggccctctgaaggggccgccggcccccagacaccatccttacccccccaccgaccccacagtttgtccagctgttctgttgtgtttgtcctgaccgcccccaacacctcgagggaggtctgggctgacagctccatttcctccccaggagccaagaccaaggagaatgttgtacagagcgtgacctcaggtgagaagccccagggccaggggacacatgggggataggacccctggggctcctgcatcctagtgctggggctcaaacctagagtcctgccttacccccaactggggtcccaagccctacagacccctgcagaccataaggctaaactagggtgggcgtctccttacccccaccagcatcagaggtgccctggagtcagagggagcaggggagggtcccagcagggccagggctctgagctcctgggaaggggctgcgagcctgactccagcaggcctgccttggggctggggctggggtggaggccagccagtgtcctcccatagtggccgagaagaccaaggagcaggccaacgcggtgagcgaggctgtggtgagcagcgtcaacactgtggccaccaagaccgtggaggaggcggagaacatcgcggtcacctccggggtggtgcgcaaggtgagccccggccctcagacctgcccagtcctctcctgggcccagaaaggctgctgggcggaggcggcatcactccactccacaccccaggaaacaacacggggggctgcggctggcttcagtttcagtacccactgagcgccggcatggggtggggtccatgcttgctgttcgacctgcattcgggtctggaatcaccacaaccaccccttcgggggacttgggagcccatctcatagacaaggaaagtgaggctcaaaaccacatcttccggacggctctcagcacttaggagacaccccattttataagtgaaaacaggatcccacacggtgacaggcagcctcccgggcagtggtcaccaggccgggggctgagtagcaccagccccgcccccagggcctagcctccctccctgggctgggcggggcagctgcctcctgctgggagcctcagggaagtagcgtcccctagtggtaagaaagcagtgctgcttctgaccctaccctctgcagctgcctttgtgtgtgtgtgcacgtgtgttgagtgagcatgtgggtgcatttgtgagaatgtgtgggtgtacatgcgtgtgaatgtacacatgcgtgtgcggcccaatagcagacagcacaggagcagtggggcgcaccccagggacgggtgttggctgggtgagctgtcccagcacctgtgacacagcaagctctgctttacgcattgtacgcttattagttcatttaatagacacaaaatccatgagacggtgtggaaactaaggcccagagagattaatgtgcccaaggtcccatggctagttcatgtgagcttggaattcccctgagcagcctgtactctgagagaccctgtggcagtgtaagtggtggcctgggctaggattcctacctgggggtggggcgggggagcagtgtccagctctcctacctgctccaggcctcctaggtggtggagtctgaggctctgagcactgagaatccctgcgttaggagtgggtgggtggaagggtgggggctgccctactcctcttggctctggggcgatgcccaggtgtctgcttccagggccagcacagggtctccatgtccttggaactggcagccgctccctctcctagttctcctttctcgttgtatgaccttgagaagcaaaggaacctctctgggcctccgtgttctcatctgcaagatgggggtgagagtgtcggcctccctgggctgtgtgatgaggcagggccatgacctccatgaagcaattctcctggtctatgtgagcacccagcagaggaaggtgaccatcatcatcatcatcatcatgtgtcccaggcagaacacatagagccccagggggctcctccctcctcacccccagcaaaagaggccctggggtgagggtgcccgggcattccttgtgaatcccggagcagggctagtgagcccttggagccacctcgagggagactcatttcctggtgacaccccaaaaccagtcacgactcatctcccagtgaactgtgaaaggcctcagcagggactatctgaccactcatacccctggcctcatcatcagccttagggcagcaggactcagcaggtggccacctgccctgcccctggatagcctggccgactcccgccagcacagcactgcccttttatgccccactccgccaaggggcaggatggccctggggcaacacagaggtgacagtatccccgccttcccccccgtcccccgccagaggcaggtgctgaggccagagtgcagggcaatcaccagtgtggtcctacacacccagctgtcatgatatctcacgcaagtgtctggccggcatggagtgcaggagatagaagatgggaagtgagagaggactgtgtaacctctgctggccctgaccagcctgagcccagagcctgtccaggaggcaaagagagggagccatgctcctgtggactgaagtgggcctgaagcaagcctgatctgatgccaacacaccccaccactttgagctcgaaggccctgagctgcatgccaagcctccctggcctcagagtccctatgtgaaccccaatcagtcttccttgtagggctactgaggtggggtcagacctggggcttcaggggcctctgcccactctaacccccactccaccctaccccacccaggttcctcatcagtgaagcccaactaggggcttcccagagactggggaccagcttgaggggtgaagctgggctccagggtacttggtgcccctggaaggcctcggcatcatcagagccccgggtattgtctgaattgcacgcccccaatacctccagcccctccaagtacaacaaggccacgaggggcctctgctcctccttgaggccagggtagacaaggccctggttgcagggcagctaggggtctctgcattctccacatggtctcatgcccccttttgtcccctacaggaggacttgaggccatctgccccccaacaggagggtgtggcatccaaagagaaagaggaagtggcagaggaggtaggagctgggctcctggggtgcaccatggggggttccttggtagggaccccatcccccacagacgcactgcttccctcctgggctcccagggcccagaggggcctcctgaccttccacagcccctacagggactgtgtacagggctaaccctgaacctgagtgggaggtccccccacggatgacccctcaggcatggggcacagaagacaacttttctcagcccactcagggtggcccattaaggctggggcctggagctgggtgtgcaggtcattctctctcccaggcccagagtgggggagactagagggctacaggccagcgtggatgacctgaagagcgctcctctgccttggacaccatcccctcctagcacaaggagtgcccgccttgagtgacatgcggctgcccacgctcctgccctcgtctccctggccacccttggcctgtccacctgtgctgctgcaccaacctcactgccctccctcggccccacccaccctctggtccttctgaccccacttatgctgctgtgaattttttttttaaatgattccaaataaaacttgagcccactcctgccatgcttcctctgggtgctgtgtagcttgaggaggggtccccaggtcctcccaggaacaggaacgggttcagcctgttgataggaccaggtatcctatagggacacacacagggcattcatgggacctgcgtgagccttcaggaacacccccaacccacccattgcctttaacatggaggaggcagcactgccttcggctccccaagacattcgacaggactcacagtcccatccacggggatagcttagctcagcctcaaggtagcccccgcctgcctgctctgagtccctgaggaacccactgtcagcaggaggtgaagataggctcctgggtcttccctccatgtgagttctgggctccagtgtcgcaagaggaacagggccacctaacatcctccctggggcagatggtgactttcaaagatggagaagtctaaacctagtgaggatgaagggcatcccacaggagagacagaaggtggaccctgcggcgc

SEQ ID NO: 73 - DNA, 5666 bp, Homo sapiens
  allele 560,590,617,645,915,987,1723,1943,1950,3151,3178,3189,3284,4276,4311,4552,4995,5019,5025,5112,5136,5421,5648,5517: N is any
  allele 3779: deletion: T
  allele 4156: insertion following nucleotide 4155
  allele 4976: deletion: C
gatcctccttccggtttcatggcagcccagggtccagcggcatccaggatgctggtgggtagctgcacagcccaggccgcgggaggttggctgctctcacctaacaggcctatgtggccctgacccctacctaggaagctggggacaatggccaaggcgcctcccctctctgtgcctgtctgtccaggtgcagcatagacacagcacccctggggccaagagcacccagccagggctgcccccatgggtgggcagggcagtaaatgaatgagggacaggttgggaggtggccagccccctccagcccatggagggcacggggcaggagagctgggctgagccagcaggagcccagggagcctggtctctgccttcctatcctggaggaaggtgaggctgaacctccttccctccctccctccctccccgcccccactgcacgcagggctggctgggctccagctggcctccgcatcaatatttcatcggcgtcaataggaggcatcggggacagccgctgcggcagcactcgagccagctcaagcccgcagctcgcaggnagatccagctccgtcctgcctgcagcagcncaaccctgcacacccaccatggatgtnttcaagaagggcttctccatcgccaagnagggcgtggtgggtgcggtggaaaagaccaagcagggggtgacggaagcagctgagaagaccaaggagggggtcatgtatgtgggtaagtggggcatggcagggtgggacagtgtggtggccaaagggtgagtgcccagttaccttcgccagaccttactccccagccccagggaggcattttgggagggggcgaggccctggctatcaaggtggggtctccagaccctggagcacccacaatgccctgtgcacacctatgtgtgtttgnctttggcctcctcggggcctctgggtgtcagagaccgcagacagggctggctacctgtctgtgcacgcacanacacattcccaagcataccagcctcccctgagcctggagcccctgaagccatgagcagcctgtgctcaggtggcccccaccctctccacacgggagcggctacagccaggtcacggatcccctccctccccagagagaaggggcaggctgggggatgaaacctaggctcagtgttccctcccccgcatcctctcctggcactctccagaggaggaaggggaggtcaagccaatgactcagctctggcccatcctgtcctgttgctgcttctgaggcccggccacacccgggcaggggctggaccctgggtctagccagtgtccctacctcaggcctgctctctcttgtcccccacattctgtcctgtccccttcccatccatccacttcttccagacacagcaggaagaggccctctgaaggggccgccggcccccagacaccatccttacccccccaccgaccccacagtttgtccagctgttctgttgtgtttgtcctgaccgcccccaacacctcgagggaggtctgggctgacagctccatttcctccccaggagccaagaccaaggagaatgttgtacagagcgtgacctcaggtgagaagccccagggccaggggacacatgggggataggacccctggggctcctgcatcctagtgctggggctcaaacctagagtcctgccttacccccaactggggtcccaagccctacagacccctgcagaccatnaggctaaactagggtgggcgtctccttacccccaccagcatcagaggtgccctggagtcagagggagcaggggagggtcccagcagggccagggctctgagctcctgggaaggggctgcgagcctgactccagcaggcctgccttggggctggggctggggtggaggccagccagtgtcctcccatagtggccgagaagaccaaggagcaggccaacgcngtgagcnaggctgtggtgagcagcgtcaacactgtggccaccaagaccgtggaggaggcggagaacatcgcggtcacctccggggtggtgcgcaaggtgagccccggccctcagacctgcccagtcctctcctgggcccagaaaggctgctgggcggaggcggcatcactccactccacaccccaggaaacaacacggggggctgcggctggcttcagtttcagtacccactgagcgccggcatggggtggggtccatgcttgctgttcgacctgcattcgggtctggaatcaccacaaccaccccttcgggggacttgggagcccatctcatagacaaggaaagtgaggctcaaaaccacatcttccggacggctctcagcacttaggagacaccccattttataagtgaaaacaggatcccacacggtgacaggcagcctcccgggcagtggtcaccaggccgggggctgagtagcaccagccccgcccccagggcctagcctccctccctgggctgggcggggcagctgcctcctgctgggagcctcagggaagtagcgtcccctagtggtaagaaagcagtgctgcttctgaccctaccctctgcagctgcctttgtgtgtgtgtgcacgtgtgttgagtgagcatgtgggtgcatttgtgagaatgtgtgggtgtacatgcgtgtgaatgtacacatgcgtgtgcggcccaatagcagacagcacaggagcagtggggcgcaccccagggacgggtgttggctgggtgagctgtcccagcacctgtgacacagcaagctctgctttacgcattgtacgcttattagttcatttaatagacacaaaatccatgagacggtgtggaaactaaggcccagagagattaatgtgcccaaggtcccatggctagttcatgtgagcttggaattcccctgagcagcctgtactctgagagaccctgtggcagtgtaagtggtggcctgggctaggattcctacctgggggtggggcgggggagcagtgtccagctctcctacctgctccaggcctcctaggtggtggagtctgaggctctgagcactgagaatccctgcgttaggagtgggtgggtggaagggtgggggctgccctactcctcttggctctggggcgatgcccaggtgtctgcttccagggccagcacagggtctccatgtccttgganctggcagccgctccctctcctagttcncctttctcgtngtatgaccttgagaagcaaaggaacctctctgggcctccgtgttctcatctgcaagatgggggtgagagtgtcggcctccctgggctgtgtgatnaggcagggccatgacctccatgaagcaattctcctggtctatgtgagcacccagcagaggaaggtgaccatcatcatcatcatcatcatgtgtcccaggcagaacacatagagccccagggggctcctccctcctcacccccagcaaaagaggccctggggtgagggtgcccgggcattccttgtgaatcccggagcagggctagtgagcccttggagccacctcgagggagactcatttcctggtgacaccccaaaaccagtcacgactcatctcccagtgaactgtgaaaggcctcagcagggactatctgaccactcatacccctggcctcatcatcagccttagggcagcaggactcagcaggtggccacctgccctgcccctggatagcctggccgactcccgccagcacagcactgcccttttatgccccactccgccaaggggcaggatggccctggggcaacacagaggtgacagtatccccgccttcccccccgtcccccgccagaggcaggtgctgaggccagagtgcagggcaatcaccagtgtggtcctacacacccagctgtcatgatatctcacgcaagtgtctggccggcatggagtgcaggagatagaagatgggaagtgagagaggactgtgtaacctctgctggccctgaccagcctgagcccagagcctgtccaggaggcaaagagagggagccatgctcctgtggactgaagtgggcctgaagcaagcctgatctgatgccaacacaccccaccactttgagctcgaaggccctgagctgcatgccaagcctccctggcctcagagtccctatgtgaaccccaatcagtcttccttgtagggctactgaggtggggtcagacctggggcttcaggggcctctgcccactctaacccccactccaccctaccccacccaggttcctcatcagtgaagcccaactaggggcttcccagagactggggaccagcntgaggggtgaagctgggctccagggtacttggtgnccctggaaggcctcggcatcatcagagccccgggtattgtctgaattgcacgcccccaatacctccagcccctccaagtacaacaaggccacgaggggcctctgctcctccttgaggccagggtagacaaggccctggttgcagggcagctaggggtctctgcattctccacatggtctcatgcccccttttgtcccctacaggaggacttgaggccatctgccccccaacaggagggtgnggcatccaaagagaaagaggaagtggcagaggaggtaggagctgggctcctggggtgcaccatggggggttccttggtagggaccccatcccccacagacgcactgcttccctcctgggctcccagggcccagaggggcctcctgaccttccacagcccctacagggactgtgtacagggctaaccctgaacctgagtgggaggtccccccacggatgacccctcaggcatggggcacagaagacaacttttctcagcccactcagggtggcccattaaggctggggcctggagctgggtgtgcaggtcattctctctcccaggcccagagtgggggagactagagggctacaggccagcgtggatgacctgaagagcgctcctctgccttggacaccatcccctcctagcacaaggagtgcccgccttgagtgacatgcggntgcccacgctcctgccctcgtctncctggncacccttggcctgtccacctgtgctgctgcaccaacctcactgccctccctcggccccacccaccctctggtccttctgaccccacntatgctgctgtgaatttttttttnaaatgattccaaataaaacttgagcccactcctgccatgcttcctctgggtgctgtgtagcttgaggaggggtccccaggtcctcccaggaacaggaacgggttcagcctgttgataggaccaggtatcctatagggacacacacagggcattcatgggacctgcgtgagccttcaggaacacccccaacccacccattgcctttaacatggaggaggcagcacngccttcggctccccaagacattcgacaggactcacagtcccatccacggggatagcttagctcagcctcaaggtagcccccgcctgcctgctctgagtccctgaggaacccactgtcagcaggaggtgaagataggctcctgggtcttccctccangtgagttctgggctccagtgtcgcaagaggaacagggccacctaacatcctccctggggcagatggtgactttcaaagatggagaagtctaaacctagtgaggatgaagggcatcccacaggagagacagnaggtggaccctgcggcgc

SEQ ID NO: 74 - DNA, 19 bp, Artificial Sequence
  Primer
ctccattccgcttacccaa

SEQ ID NO: 75 - DNA, 20 bp, Artificial Sequence
  Primer
aagaggtcccccaaattgta

SEQ ID NO: 76 - DNA, 18 bp, Artificial Sequence
  Primer
gaggactgagcggaaggt

SEQ ID NO: 77 - DNA, 18 bp, Artificial Sequence
  Primer
ggactaaggacaccgttt

SEQ ID NO: 78 - DNA, 18 bp, Artificial Sequence
  Primer
tggcgacgtgtgtctgac

SEQ ID NO: 79 - DNA, 18 bp, Artificial Sequence
  Primer
accactgaagccgactga

SEQ ID NO: 80 - DNA, 17 bp, Artificial Sequence
  Primer
ggcgaggacggtgaaga

SEQ ID NO: 81 - DNA, 17 bp, Artificial Sequence
  Primer
gtcctcgcctgcgtcct

SEQ ID NO: 82 - DNA, 17 bp, Artificial Sequence
  Primer
aggcacccccactgact

SEQ ID NO: 83 - DNA, 18 bp, Artificial Sequence
  Primer
tgcaggccgggtgactct

SEQ ID NO: 84 - DNA, 20 bp, Artificial Sequence
  Primer
cgccccctcacagtcagaca

SEQ ID NO: 85 - DNA, 17 bp, Artificial Sequence
  Primer
cggtggcggctttaagt

SEQ ID NO: 86 - DNA, 17 bp, Artificial Sequence
  Primer
cgtcgccaccctcacaa

SEQ ID NO: 87 - DNA, 19 bp, Artificial Sequence
  Primer
ttgctgctaggtcacctta

SEQ ID NO: 88 - DNA, 20 bp, Artificial Sequence
  Primer
ctatctcaaatccctatcca

SEQ ID NO: 89 - DNA, 19 bp, Artificial Sequence
  Primer
ctttacgagggttctggta

SEQ ID NO: 90 - DNA, 18 bp, Artificial Sequence
  Primer
ggaggaaaggaatgactg

SEQ ID NO: 91 - DNA, 22 bp, Artificial Sequence
  Primer
agtcctcatcacatgctttata

SEQ ID NO: 92 - DNA, 20 bp, Artificial Sequence
  Primer
gggaaactaatgttcagaga

SEQ ID NO: 93 - DNA, 18 bp, Artificial Sequence
  Primer
atggaaagggctgctgaa

SEQ ID NO: 94 - DNA, 18 bp, Artificial Sequence
  Primer
caagagcaggcactagaa

SEQ ID NO: 95 - DNA, 22 bp, Artificial Sequence
  Primer
taactgctctgctccttaaacg

SEQ ID NO: 96 - DNA, 21 bp, Artificial Sequence
  Primer
tcatctctggggtagatcaac

SEQ ID NO: 97 - DNA, 20 bp, Artificial Sequence
  Primer
ctgaattgtaaaatatgcca

SEQ ID NO: 98 - DNA, 19 bp, Artificial Sequence
  Primer
gcatttacctctgttcaac

SEQ ID NO: 99 - DNA, 20 bp, Artificial Sequence
  Primer
aatccccacctatgtattct

SEQ ID NO: 100 - DNA, 22 bp, Artificial Sequence
  Primer
aaagacacttttaattccgtag

SEQ ID NO: 101 - DNA, 19 bp, Artificial Sequence
  Primer
tccccacctatgtattctc

SEQ ID NO: 102 - DNA, 19 bp, Artificial Sequence
  Primer
ttaaaatgttgctggtttg

SEQ ID NO: 103 - DNA, 19 bp, Artificial Sequence
  Primer
aggtgggaggatcaattca

SEQ ID NO: 104 - DNA, 22 bp, Artificial Sequence
  Primer
gaaggcaattctctgtctatgt

SEQ ID NO: 105 - DNA, 21 bp, Artificial Sequence
  Primer
cacaacataaataatgaaacc

SEQ ID NO: 106 - DNA, 20 bp, Artificial Sequence
  Primer
ttttcacattttcctttcag

SEQ ID NO: 107 - DNA, 19 bp, Artificial Sequence
  Primer
cgaaaccccatctctatct

SEQ ID NO: 108 - DNA, 21 bp, Artificial Sequence
  Primer
atcattttctgtggcaattga

SEQ ID NO: 109 - DNA, 18 bp, Artificial Sequence
  Primer
gtgccaacaaccaccatc

SEQ ID NO: 110 - DNA, 19 bp, Artificial Sequence
  Primer
ggattctcccatgaaaatc

SEQ ID NO: 111 - DNA, 22 bp, Artificial Sequence
  Primer
acacttaaaaaccattcagtcc

SEQ ID NO: 112 - DNA, 20 bp, Artificial Sequence
  Primer
gcccagccagtagtctactc

SEQ ID NO: 113 - DNA, 18 bp, Artificial Sequence
  Primer
gggggaagaatcatccat

SEQ ID NO: 114 - DNA, 17 bp, Artificial Sequence
  Primer
cccacttctgcaccatc

SEQ ID NO: 115 - DNA, 21 bp, Artificial Sequence
  Primer
gcctcttcccatacatacaat

SEQ ID NO: 116 - DNA, 22 bp, Artificial Sequence
  Primer
aacaccctttctgtcacatatc

SEQ ID NO: 117 - DNA, 18 bp, Artificial Sequence
  Primer
gccccaagtagcaaatca

SEQ ID NO: 118 - DNA, 19 bp, Artificial Sequence
  Primer
ccatcttccacttatctga

SEQ ID NO: 119 - DNA, 20 bp, Artificial Sequence
  Primer
atcgcaggtaaaagactatc

SEQ ID NO: 120 - DNA, 22 bp, Artificial Sequence
  Primer
agtttcaacaacttaggctatc

SEQ ID NO: 121 - DNA, 18 bp, Artificial Sequence
  Primer
gccctgttgctacaaagt

SEQ ID NO: 122 - DNA, 19 bp, Artificial Sequence
  Primer
ttctaaatcaagcatagcc

SEQ ID NO: 123 - DNA, 21 bp, Artificial Sequence
  Primer
aagagggatgggtatagatta

SEQ ID NO: 124 - DNA, 21 bp, Artificial Sequence
  Primer
ttttaaccagaaacattcgtg

SEQ ID NO: 125 - DNA, 19 bp, Artificial Sequence
  Primer
tggtgttgcttcattatac

SEQ ID NO: 126 - DNA, 19 bp, Artificial Sequence
  Primer
ggtaggaaagagacaacga

SEQ ID NO: 127 - DNA, 19 bp, Artificial Sequence
  Primer
tatggcatgaggcacaacc

SEQ ID NO: 128 - DNA, 20 bp, Artificial Sequence
  Primer
gaatctctcctgcgagcact

SEQ ID NO: 129 - DNA, 20 bp, Artificial Sequence
  Primer
gctccctatctacttgttga

SEQ ID NO: 130 - DNA, 20 bp, Artificial Sequence
  Primer
aactaaaggataacagggac

SEQ ID NO: 131 - DNA, 19 bp, Artificial Sequence
  Primer
caaagaaagtgattcccta

SEQ ID NO: 132 - DNA, 20 bp, Artificial Sequence
  Primer
tgatctgcatatggaccagt

SEQ ID NO: 133 - DNA, 18 bp, Artificial Sequence
  Primer
tgtgagcctccccaaatc

SEQ ID NO: 134 - DNA, 18 bp, Artificial Sequence
  Primer
atggaaaacaatgctgtg

SEQ ID NO: 135 - DNA, 19 bp, Artificial Sequence
  Primer
ttagccaggatggtctcac

SEQ ID NO: 136 - DNA, 20 bp, Artificial Sequence
  Primer
cctagtgtccagaaagacga

SEQ ID NO: 137 - DNA, 19 bp, Artificial Sequence
  Primer
gcctctccttttctaggtg

SEQ ID NO: 138 - DNA, 18 bp, Artificial Sequence
  Primer
cagcaactccagaacaaa

SEQ ID NO: 139 - DNA, 20 bp, Artificial Sequence
  Primer
aacctaaatcagggtccaat

SEQ ID NO: 140 - DNA, 20 bp, Artificial Sequence
  Primer
tcttcactactaccagtgcg

SEQ ID NO: 141 - DNA, 20 bp, Artificial Sequence
  Primer
atgagaaaatatgattagcc

SEQ ID NO: 142 - DNA, 18 bp, Artificial Sequence
  Primer
agcctcaagaattcaacc

SEQ ID NO: 143 - DNA, 22 bp, Artificial Sequence
  Primer
aggtgtccaccagagtctacta

SEQ ID NO: 144 - DNA, 20 bp, Artificial Sequence
  Primer
tgaggttgcagtgaactgaa

SEQ ID NO: 145 - DNA, 18 bp, Artificial Sequence
  Primer
aatgccacagggttatga

SEQ ID NO: 146 - DNA, 20 bp, Artificial Sequence
  Primer
ttacatgtctgttttgggat

SEQ ID NO: 147 - DNA, 20 bp, Artificial Sequence
  Primer
tatcatttgtttgggttggg

SEQ ID NO: 148 - DNA, 19 bp, Artificial Sequence
  Primer
ggggatggctttatagcgt

SEQ ID NO: 149 - DNA, 18 bp, Artificial Sequence
  Primer
acagccagctttaataga

SEQ ID NO: 150 - DNA, 18 bp, Artificial Sequence
  Primer
cagaaaggggaaagaagg

SEQ ID NO: 151 - DNA, 20 bp, Artificial Sequence
  Primer
ttgaatccaggctgtctaat

SEQ ID NO: 152 - DNA, 19 bp, Artificial Sequence
  Primer
aatgggaaaaatccaaata

SEQ ID NO: 153 - DNA, 18 bp, Artificial Sequence
  Primer
tccacagagcaagagggt

SEQ ID NO: 154 - DNA, 19 bp, Artificial Sequence
  Primer
gggaaaactaggtgaagtg

SEQ ID NO: 155 - DNA, 18 bp, Artificial Sequence
  Primer
tcaagtacccgtcaattc

SEQ ID NO: 156 - DNA, 20 bp, Artificial Sequence
  Primer
ttttccagcatcagcatcag

SEQ ID NO: 157 - DNA, 18 bp, Artificial Sequence
  Primer
gagaggttcccaagtaaa

SEQ ID NO: 158 - DNA, 20 bp, Artificial Sequence
  Primer
tttctttcaccactaccata

SEQ ID NO: 159 - DNA, 20 bp, Artificial Sequence
  Primer
ggcttgggatataaagacga

SEQ ID NO: 160 - DNA, 22 bp, Artificial Sequence
  Primer
tgatgagagggaacttagtgct

SEQ ID NO: 161 - DNA, 20 bp, Artificial Sequence
  Primer
aaggttttctcaagtctctc

SEQ ID NO: 162 - DNA, 18 bp, Artificial Sequence
  Primer
aactccaggcttctctac

SEQ ID NO: 163 - DNA, 20 bp, Artificial Sequence
  Primer
gggtagatccaggtctaggt

SEQ ID NO: 164 - DNA, 20 bp, Artificial Sequence
  Primer
tgacaagatgggagtttgaa

SEQ ID NO: 165 - DNA, 18 bp, Artificial Sequence
  Primer
accccaactccccaaata

SEQ ID NO: 166 - DNA, 20 bp, Artificial Sequence
  Primer
tttatttgctcagacaggtt

SEQ ID NO: 167 - DNA, 20 bp, Artificial Sequence
  Primer
aaagtcattaagcgtttgtg

SEQ ID NO: 168 - DNA, 22 bp, Artificial Sequence
  Primer
tataaaaattacccagacgtgt

SEQ ID NO: 169 - DNA, 19 bp, Artificial Sequence
  Primer
ctgacctcaagtgatcctt

SEQ ID NO: 170 - DNA, 17 bp, Artificial Sequence
  Primer
ccactgcactccagcgt

SEQ ID NO: 171 - DNA, 20 bp, Artificial Sequence
  Primer
tgtgatgctgtggctagctc

SEQ ID NO: 172 - DNA, 19 bp, Artificial Sequence
  Primer
caaacttgcttcctcgtgt

SEQ ID NO: 173 - DNA, 19 bp, Artificial Sequence
  Primer
ttatctccagtttccgttc

SEQ ID NO: 174 - DNA, 19 bp, Artificial Sequence
  Primer
gggaagcatcttttctata

SEQ ID NO: 175 - DNA, 22 bp, Artificial Sequence
  Primer
ttttagttcccaatgaacaagt

SEQ ID NO: 176 - DNA, 19 bp, Artificial Sequence
  Primer
ggtagcaggcaacctttag

SEQ ID NO: 177 - DNA, 20 bp, Artificial Sequence
  Primer
cccaagaagtggaggttgta

SEQ ID NO: 178 - DNA, 19 bp, Artificial Sequence
  Primer
caggcaacctttagaggat

SEQ ID NO: 179 - DNA, 21 bp, Artificial Sequence
  Primer
taaaaagattaaaaccatgcc

SEQ ID NO: 180 - DNA, 21 bp, Artificial Sequence
  Primer
gtacagaccaattcacgaccc

SEQ ID NO: 181 - DNA, 20 bp, Artificial Sequence
  Primer
atgtaatgttttccactgat

SEQ ID NO: 182 - DNA, 19 bp, Artificial Sequence
  Primer
cagaagaaaggtcagcaga

SEQ ID NO: 183 - DNA, 19 bp, Artificial Sequence
  Primer
cattcattttaagcattgt

SEQ ID NO: 184 - DNA, 18 bp, Artificial Sequence
  Primer
gtatgctcccagtgtccg

SEQ ID NO: 185 - DNA, 19 bp, Artificial Sequence
  Primer
caaaactctgaagattccc

SEQ ID NO: 186 - DNA, 128034 bp, Homo sapiens
  misc_feature 34: N is unknown
  misc_feature (61599)...(61698): N is unknown
cagcacttgggaaggccaagacaggcgggtcacncgagggggggagttggagcccagcctgatcaacatggagaaacccgtctctactaaaaacacaaaaattagctgggtgtggtggcgcatgcctgtaatcccagctacttgggaggctgaggcaggagatttgcttgaacctgggaggcggaggttgcgctgagccaagatcatgccattgcactccagcctgggtgacaagagcaaaacttcgcctcaaaaaaaaaaaaaaaattccttttctttcctctgctaaaacatctggggggacaaaagatattatttttctgaacattaccaattaggaaataaacgccaatctgtcaccactgggcttcctttttaagtttttttctttcaatcattaggaactcctgactcagctctatggtgaactctattctatctgggctaatggaaggaacttacagcacagataaacactaatatttggcttccagtatatcagaatacttatatttgaatatgtgtctagttttcctatctaaggcaaagaatgacttcagcacattactttttctgcttctaaaaaagttgtaggccgggcatggaggctcacgcctataatcccagcgctttgggaagctgaggtaggggggatcatgaggtcaagagatcgagaccatcctggccagcatggtgaaatcccgtctctactaaaaatacaaaaattagctgggcatggtggcgtgcgccagtagtcccagctactctggaggctgaggcaggagaatcacatgaatccgggaggtggaggttgcagtgagccgagatcgcgccactgcactccagcctggtgacagagcgagactccatcaaaaaaaaaaaaagaaagaaaagaaaaaaaagttgtctaggtggtttacaccttatacttgtttgagtgagagtgggaaagattacaccctagaccttcacatttcctactttttctcatcattctggggtctgcctgaatgtcacttcctcaaagaggcctttcctgaccacctgttccttcatatcacttactcacttgattattatctgtttttcccacacagctagaaggtaatctccatcaagacagaaacttttgtcttttttgtccactgctgtattcccagcacctttataatacctggtatctgtaaggcattcaacaaatatttgtcaagtcataaatgagatgagcaaatcacaggttttggaataagacagtcctgggttcaaattacaactccactctttttgtccaattgttggcaagttactcaacctctctctgccacagcttcctcatctctggtaggtgaggaaatatccattacagagggtggtcatgatgactaatgaaggagccatgtacaatgccagacacagagtagactctcaaaattgttacttttctttccatccacctcctctttattgagatgatagttatgagactatattaatattaatctttcttatccaggacatctactccaaccagagggaaatttatcatgaagctaatgaagtttaaacttcagggctgctcacttgcacaggctccaaactgggagttgtagagggaaagccagttgttgtctggaagcattttttttttttttgagacatagagtctcattttgttgcccaggctggagtgcagtggcgtgatcttggctcactgcaacctccgcctccagggttcaagtgattctcctgcctcagcctcctcagtagctgggattacagacgcatgccaccacgcctggctaatttttgtatttttagtagacacggggtttcaccattttggtcaggctggtctcgaactcctgatctcgttatccgcccggcttggcctcccaaagtgctgggattacaggcatgagccaccacgcccggccatctggaagcatttttatgtaagcatttctaataagtagcctaaagagatctcaggaaaaaaaagggtactaatctccaagtctcgagtatttgttgtgatgtattttctctctatagtaatcttctgattgctaattttgtatttataatttgtattttatgtctcaaagaggtcccccaaattgtatatgtttcaagccctccaagtctgaatctaccccagcccatttatagattccattaatggagcataaatgtattcagaaaggctgcattaacactctcagaggagctgcttcaaggtgattgactactctgcattgggactggtaatttaaaggttcttaaaaccatgcacttgcaaacaccactaggaggcttgccataatttttacctgttttcatccaaaggtttgcctttaggtgaaaccgcactgttaaaaagatcgtgggtacgtcttcgataaagcatcaacttgattaaggaaccctcctactgaattcccatttaaagcaatacttggactaaggacaccgtttttggctgcagtcttgatcgtctgtcaatcagaaacctaaaagtacttaagctggcaagtcaccatccctaatagcattcttccttaaagactcccataaggtattatggaaagttagattcataacaactattaagttgttcgtgggtgcaaagccccataaagccactggggagaaaattctttgtttaaaaagtaaccactgaagccgactgacattagtagtattcctagtacggagtactaacaagagtagtagtttctactctggatttgaagccttgttttgctgcggcgcccgtcccatccgcaccttcctcttaagagagctgctaacttccccaaggatggaaacgtccccctgggtcctggcctctctatcgctgacccctgcgtctgaatttcccccacgccgcactcgagccttgtctccagcgcatctgtgccttcgcggtccacgtccccaccgcgctctagagggagcccgcgggccgcgcgccggccgcggattcattttacgtgaggccgccgcgaccacgaaccttgttccaacacctgcagggtccggcacgctagtcagtgggggtgcctcagaaaacatagccccgtgtgccctcactggatttatgagcggcccctcgccccctcacagtcagacacacgtcgccaccctcacaagtgcggccggtgggatctagctgggaccctccccgcctgggaaagtctgggtgctggctcctaaagcgccccggccaaacccctgtccctccagtccgcctgctcaggcctcggctgtccgcggtcttcaccgtcctcgcctgcgtcctggccccatccggctccaggcaaaacccggagcagctacctctccgcagctcccgggagaccgcgcggcgccgcggctagagcatgcgcagtgcgcagggccggctcgaagcgcaagcaggaagcgtttgcggtgatcccggcgactgcgctggctaatgcggtaccggctagcgtggcttctgcaccccgcactgcccagcaccttccgctcagtcctcggcgcccgcctgccgcctccggagcgcctgtgtgggtaagcggaatggagcgcccgggccctcgggccccgtgggtcacagcggtttggcgctcgggttgcaaagtggtgattcagcacttaaagccgccaccgctgcccctcacgccgcccgtcccgccggcctggggcccgtactgccgcgctgaggccgccccagggcccggaagagcggctcgccaggcgggagccagaggcctggtccagagtcggggacgtcccttgggctggtgaggggccggggccgctacccggggccacggggcgtgtgccactagtgcggggggcgcaggggcggacagagtcacccggcctgcacctgggagccgcgccgcgtcactctcccggagtccgcctgtgagggggccgggaacctgaggcggactcgagccgtggggtaaaggaatccggcgacttcggggggaccgcttctcaccttgccctcagccctgcccttttctccgggcactgagtttccaggaccgtgtggaatgcccgcgctgggaaaaaagtttgcctgcctcccgccttggaagacgagtgtggggtttcctatcgggggacatttaggagccaaaagatacctcgggatcctctacagcagctcccttgttttacgtcggagacaaccggagctccgagagatggcttgatttcccagcaactgccgagattgtggcaaaaccaggattaggacacaggttttttgccatccggcggcgtgccctctccactgcaccgttgatctgcgtacgctaggcgttttcaggcttgtagtgaacgctgaatactttttactacgaatggaagaagataggcagtattatcttgccctccctagaaacgttatttgaacccctgctggttttaatcagtaatagccagcacctactaagtgcagggcactgtgctggaccctctatgtaaagtatgtgtctgccttccaaggaactttgacttgattggagcggattgggatgccacgggaattgagatagctacaagggtgtgttgatgagggtcagaagatgggtagtatgggtagtgtgtggggccagagatgggggggtaggctggctttggaaggaatggcagaaaggttggagtgagggctggcgtgggcgtaatccagcctagatatgcgggcagtttgtgttgggggagcagtgagccgattagtctggttgaagctttatagaatttccttggggtaattagaaggacacaagtcctgtattataacagtagggtaatgctggcctgggtcttgaattttagttgggattttcccaatgcgtagtaggtagggagccattaaagtttttgagctggaaagttatctgatggaactgggggtttaggaaagtagtttggtggctgtgtgcaggatgtcaggaagtggagagagtcctaaggcagagaaacctgttgggacttagtctttactgcctgtattaggatggtagcagtggggcactaagataagctaatacaaatgaagactctatggaacttgttctcctctgttttccactacatcacaaaatctcctataatgtgcaaaagacccctgaacttagagaatcaggtggtaagcacaggcaggatgcctccttttgtcctcttttgtgtcagtctgcttttgttctaaattcattactgataggctaggcttagctgtctccatactgtctccagcatatagcatttgtgatttttaaagaaagcaccaattttaagttttgtataactaagtggtttgtatgttctagttaaaattacattttctctgtagttataaagtccggtcgaccatccagagttttaagatatgtttttctcaaagatggaaatttgagagattcaaagcataatgaatgagatgagccagctagaaagctctaccctaaaatcagtgagtgaggcttttgaggaaaatacaggtccaaccaaagggattagggcatagttttaggaaggaaagcactaacatctgaagctaccacatattctcatcttaaggaatgcaatcagccctactgtacatagtcggaagaatgtcttaacagagatagccacacagctatttgctggaagagctgggatttaacccatgtctatctggcatcggagcctgagctcttaactgttatgtatttgcaaacacaagtactgcctctgctggtatttgggcattcattttctggtctaacctcttgagacagagatggtcttaaagcatttatgtaagatcaatccatttacagagtaacctccttgttctgtgttcagctgtattttataacttgggactgtgtggaattatctgaactactggggcacctggagataatagcccattccctggcaacaacttgagccacctgggcatcagtcatctcactttgcaggcagccctactttgcatttccctgttccataggcttaggaaacagtggtatgtcagttgggactatcaacattcaagcttttaaactactgtcaatcagaaaaatgccttttaatagtgtaaaagaacagggtacccctgaagtttctttaacctaatccacacattctgcctgtcttgaaagttagggttgaggccaggtggggtggctcatgcctgtaatcccaacactttgacagggcgaggtcggggggatcacttgaggtcaggagttcaagaccagcctgggcaacatggtgaaaccccatctctactaaaaatacaaaaaaattagccgggcgtggtggtgggcgcttgtaatcccagctactcatgaggctgaggcaggagaatcgcttgaacccgggaggctgaggcaggagaatcgcttgaacccaggaggcggaggtgcagtgagctgagatcgtgccactgcactccagcctgggtgactgagcgagactgtgtcttaaaaaaaaagaagttagggttggggacagtctccccagggtaggggagaaaaagttcagtatgttttcttttttttaaagttcgagacagggtttcactctgtcgcccaggctggagtgcagtgatgtgatctcagctcactgcagccttcatctcttgggttcaagtgatcctcccacctcagcctcctgagtagctgggactgcaggctcatgccaccaccccacaactaatttttgtatttttggtagagatggggttttgtcatgttgcccagggtggtctcaaactcctgggctgaagcaatccccctgcctcccaaagtgctggggttacaggcatgagccactgtgccaggcccagtatatgtttcataaacactggtttcctttctgtttttctgttggtattttatatctcctaaacatgtagccagaggatcaggctaccttttagccaggatgacaaggctagagcactttccctccacaggggtagatcctctatagatatgttaggttctggagccttctcatttggcttgtcttcagtctgttttcactgttctgttagtttagacattatttgaatgtctactctgtagtgatcacacactgtgtccagtactatgtaaatgcaaagataaccataaatcttgtcctcaaggagctttcagtaataaacagtaaactgctttacctctgaccttttactagacacctccacttttatgttttgttgtttctttcaattaattttgaaaaacaacttagtattttatcaccatactgattacttttttaaaaagtgggactcacaaaattattttattcttctcaaagaactgtttagtttctttttgcctattaaaagtgtaactttttttttttttgagactgagtcttgttctgttgcccaggctggagagtgacacgatcttggctcactgcaacttccacctcccgggttcaagtgattcttctgcctcagcctccagagtagctgggattacaggtgtgtgccaccacacacaactaatttttgtatttttagtagagctgggatttcaccatgatggccaggctggtcttgaactcctgacttcaggtgatctgcccaccttggcctcccaaagtgctcggattacaggcgtgagccactgcgctcggaataactttttaaagtaggactcacaatctgctttctgaagggaaggcatcacactctgcctgacacatagtaggtactcagtacatatttactgcataacttaattgattaatggtcttttttcaaaacaatttttttctgtagagtccttagttttgctatgttgttatcattttttcagtttagcttgaaaatgagagttttcagtttagcttgaaaatctttgaatctttttccctcattgcctattcccaagacccaatcctcctgagtctttcatcctaaagattcctaaagtttcttggagtgatcttgaccctcatcaccatcctagttcaggccatgatcatcttcgtaacatcttacatcagtgagattatctcacctgaacaggttttagaactgacttttccagccttctgtctccctactagttgattcttatcatcacatcagattaataaaccacttttcccaagctgttgtctcgcctaaatatcaccagtggttctgtgctatttcaagatcaagttcaaacttcttgacccagcatgtaagcattctgttggctggcttagcccaacttttcagcctaactcttctccagtcagacttaccaatttgctgtctccttttacatgacctattcattcccaattccgagatgccctttctgtcttttctttatatgactaaatcctttattctttttaggccttgttatacaggtcacacaattactcttcctttttctcaacttaataatttttaaaaacattgtgaaacatctatttgatgtttatatattgcctcttatttttttactctcttatttaatattgtacatgccagagtatataggacaaagaagaaaaaaacacctgtgtaccatctactttaggaaacaaacatttccagcaactttgaacctgtctgtgctcacctgtccaattataactctgctcctcccctgtaaaggtattgttattattattattattatttttttttttgagaaagagtctgcccttgttgcccaggctagagtacagtggcgcaatctcggctcactgcaacctccatctcccagcttcaggcgattctcctgcctcagcctcccaagtagctgggactacaggcgcgtgccaccacgcccggctaatttttgtatttttagtagacatggggtttcaccatgttgcccaggctggtcttaaacccctgacctcaggtgatccacccacctcagcctcccaaagtgctgggattacaggcgtgggccaccgtgcccggctgtattattctatatttggataacaatttccttagttttctttatagttttatcacatttgaatacttcttaagcagtatattgtttagttttattgtttattttagttttatagcttttgacctttattgcaaacttttctgagttactttttttcatttaactttcatttaacatcattcataaagatgtatgagttcactgctgaatggcagtcatgcaagtatgccctggtatcatattgatcattgcaaaaattctgtaagataggcctaatctatattctgacaactcccaaatgtatttctctagccagaacctctccctcaaatttcaggtttgagtaataaacttcctactcaacaatgtgagtcacactggtctacttgcttgacttgctcttacctcagatcatttgcattgttttccctctgctgagaacaccctgctgctagtaagaatggcgagagctttgcagagaacataggatttgaacaagagtctttgaaggaaatattgaattggatgaacaaagaaggagagttgagaaaatattttattttttggagacaggatctcactgtcacccaggctggagtgcagtggcacgatcaaaactcactgcagccatgaactcctgggctcaagtgatcctctcacctcagcctcctgtagctaggactacagacttgtgccaccatgcctggctaatttttaaaattttgtagaggcaggatcttgctatgttgtccatactgatctctaactcctggcttcaagcaatcttcctgcctctgcctcccaaagtgctgtgattacaggcataagccaccacaaccagaagagaaaatattttagatagaaggaatggtattagcaaaggttcaaaagtagggaaattcacaatatcagcaaaggaaagtgaaattttgtcttattggatatagagaacctcagatgctttttgagcaattcagtgacatatgaaagctgtatttttggctaattaatctggctgttttttgtaagcactgtttgaaacgcaggcagagactgatgagggataaagaaggtagtacaaatgacaaggaaagaagagtgtctgcagaagacatgtgcaagaaggattcagcagagtttagttattgattgatgtagggacgatgtgggagtcagagaagcctgaggtcttgagcgtgagtgactttgagtctagaataggaggggccaccagggtagggaaaactcttgtcggggagacccagctctgggaagaagttcagctaggtgagatgtttgtcctgcctggcaggtggcaggttttccaaaggcataccaagagaacgaaccactgcttgggtacagcagtgggcacagtcttgtaggcacttttgggctggctgttaccctcaggtcccgtagggtagtggacaggactgagcggtccttaaatacccaagggaatgaaatctagtttgtagattggtagctcagggactagttcaattgaaagatcagaaccacattgatgaatactgacctactactggggtttcttatttgttttgcttaaggataggaaatggatccagagcctagaacaagtctgacctgtgctggggtctaagtggattcagctgtaacgctcttgctgctgctgacgatgttaaccataaaagatttagtagctaatatttattgaatgcttattgtatgttatgcttttttgggtggggggtagtcatcccctcaagcatttattctttgttacaaacaatccaattaaactcttttagttattttgaaatgtgcaattattattgattatagtcaccctgttgtgctatcaaatcctaggtctttttttttttctttggtacccattaaccatccccacctgccctcaaccacccactacccttcccagcctctagtaaccatccttctactctctatctccatgaattcaattgttttgatttttagatcccacaaataagtaagaacatgtgatgtctgtcattctgtgcctggcgtatttcacttatcatcataacctccagtttatgcattttattaggagctttgcctatgttgtgtgtgtgtgtgtgtgtgtgtgtgagagagagagagagagagagagagatagagtctgactctgtcactcctaggtggagtgcagtggcgtgatcagggctcactgcagccttgacctctctgggctcaggtgattctcctgccatctcagtactcccctgtttcctgggtagctggggctagtagctggaacttggcacataccaccatacctggctaattttttggagtttttttttttttttgtagagacaggatttcgtcatgttgcccagactggtcttaaactcctcggttcaagcagtccacctaccttggcctcccaaagtactgggattataggcgtgagccactgcacctggctacatatgttgtcttgtttaatggccacggtaattatgtgggagagtggtggtggtagtcttttttttttttctttcagataaggatattgaagctcaaagaggttaacttgctcaaggatacacagctagtaagtggcttagcgagatatgaattcaactgggctcactcaagaacctcaggggttggccattatattgtcttcttcctagaggtagcacgatatctttagtagagatggggacgttaaaacagggagattttttagaaagaatatacatggtagttgatgatattgagtctgaagtgattactggatagccaaggggagatctgcaggaagcatttgaaatatgactggaacttggtaagaaggcctgagctgatttcctaaatctgaagatagagttgaagacacggacatggatggatataggaaaaataatctatgtttagatgcggtgggggagggggcagccttgacaatgctcacatttaggtataagaaggaaacatagttggagaggttgggagttagagaggtggaagatgatatcggaagtgaaatagtctgaagttctagccaaagagattttggggagaatagggtcttgagaaaagaacaaataccatttctttctttcttttcttttttttttttttttgagatggagtctcgctgtgttgcccaggctggagtgcagtggtgctcactgcaacctctgtctcctgagttcaagcaattctcattccttagcctcctgagtagctgcaattacaggtgcccaccaccatgcccagctaattttttctttttttttttttttttctgagacagagtctcgctctgtcacccaggctggagtgcagtggcgagatcttgacccactgcagcctccgcctcctgggttcaagcaattctgtttcatcctcctgagtagctggaattacaggcgcccgctaccacgccggctaatttttttatatttttagtagagatggggtttcaccatgttggccaggctggtctcaaactcctgacctcaggtgatcaacccacctcagcctcccaaagtgctgggattacaggcatgagccagcacacctggctactgttatttcttgatctcttaattttagaaattttctgttgctttgttatgcccagctattttatttttttagagatggggtcttactgtgttgcagaggttggtcttgaactcctggcctcaagtgatcgttctgcttagcctcccaagtagcaaggattacaggtatgagccatcacacccaactgtttacatatttctgattcttcccacttgatcttatggtcctatggacatttagtacagtttcagtttttttttttttttttttttttttttttttttttttttgagacagtctcgctttatcgcccaggctggaatgcagtggcgcagtctcggcttactgcaacccctgtctctcgtgttcaagcattctcctgcctcagcctcctgagtagctgggactacaggcgtgtgccaccatgcccactaatttttgtgtttttttagtagagagacagggtttcgtcatgttggccaggctggtctccaactcctgacctcaagtgatctgccggcctctgcctcctaaagtgctgggattacaggtgtaagttaccttgcccggcctagtacagtttcttatatgatcaaatctattagatgatctattggttccatattttctccttggagactatccttcaggacactttttccttcttgctgtagtttgaactagttttctccaggcttgctacagaatggttgcctggaatttccctttgcttctctcctctaatggatctgtttcctggttctcaaatttttttctttcttggcttgctccttcattcaagagtagttgtatattggaacaagctttcatgtaaagactacatgggagataactttttgtagatcttctggtgatttccaaacagaaaagtatagatctgggtcctagtgtgaatctacacctttgtagaataagactacaaaagtgagagagatgacctgaatggcttccactccctccatctagctctagaattctagtattgtaagtacttgggaattaagttattttacaggttatctagcatatggttaaagcagcaagctttcagggatatcctttgtgagactttgacaaaaaagacatatggcttcttttttcccctccctttaaaattgaactttaagatttttttaattgaacttaaagatttgcttttcttttctttttttctttcttttttttttgagacggagtcttgctcagctgcccagctagagtgcagtggcgtgatcccggctcactgcaacctctgccccctgccccaggttgaagcgattctctgcctcagcctcccaagtagttgggactacaggcgcgtgccaccacacccagctaatttttatatttttagtagagatggggtttcaccatgttggccaggatggtctcaatctcttgaccttgttatctgcccgcctcagcctcccaaagtgctggaattacaggtttgagccaccatgcccagcctttttttttttttctttttgagacagagtctcactctgtagcccaggctggagtgcaatggtgcaatcttggctcactgcaaactccgcatcccagattcaagtgattctcctgcttcagcctcctaaggagctggaactacaggcatgcacccacacacccagctaatttttgtatttttagtagagatgggggtttcaccatggttttttcccccccgaggtggagttttgctcttgttgcccaggctggagtgcaatgatgtggtcttggctcactgcaacctccgcgtcccgggttcaagcaattctcctgtctcagcctcccaagtagctgggattacaggcgcctgccaccacgcccggctaatttttgtacttttagtagagacgtggtttcaccatgttggccaggctggtctcgaacgcctgacttcagttgatctgtccacctcggcctcccaaagtgctgggattacaggcgtgagccactgtgcccagccagggtttcaccatgttgaccaggctggtcttgaactcctgacttcagatgatccacccgccttggcctcccaaagtgctgggattacagacgtgagccaccacacccagcctgcttttctttttatggaggaagtaaatttgaaattttgcttttaaaacaagaaataatgaaaacaaacattagtcacctgattttccttcttttttttctttcttgagttggtgaaagtttctcccttcccattgttgggctactctgtggtttctgtatgctctgctgatggccaatataggctgggagtgttggataacatttggtccagggtaaaatattcttgaattcagcttctgttccaggaagatatcagtaagattgacacctgttctaagtttgtactccagactactttaaactgccatccagttgaaaaaaatgccttattctctctatagtctatccatttgggagccagtgtgatgtagtggaaaagtcactctgacttgacacttggttattctttttatcttgaattggttagtttgcatgagtctttttcctagccaccagactaagtagcttcaaatatctttattaatcctaccaagttttggtttctgaacgttgccttctacaggtgcatagttctttttcctttcttgtgcttacatatcactaactcctcacttgatgttgcttttattttagagagtatgaccgactataaatgaggtcactgtagaccagtaggctgggatgtggcatgtggatatgttttgcagttgttattttttaaatgggaatcaacacttagaaatcctgagagttcagttccttttgggaaaaagggataatctggtaacagtgggcccacattcctgcctggcagcaattagcttgagctagggaagatttgtctttcagaaggggcatgcattccttcttacagcctgctttgcttatttacattacttttttggccttgtaaacattatatttgtgatccgttctatacagtgattggaggaagttagtcttagtagttttcagacatactggaggtttttgttaataataaaaatgaaacaaaatacacatgtaaattgctccgaaagtacagaaatgattgtgtaatcaggactaccctttgcctcatttaaagtttacgaagattatcacatcatcttattttattttatttttttttggtgacggagtctcgctctgtcacccaggctggagtgcagtggcgcgatctccgctcactgcaagctccgcctcccgtgttcaagccattctcctgcctcagcctcccaagtagctgggactacaggcacccaccaccacgcccagctaatttttttttttttttgtatttttattagagatggggtttcaccatgttagccaggatggtcttgaactcctgacctcaggtgatccgcccgcctcggcctcccaaagggctgggattacaggcgtgagctgccacgcccagcttacatcatcttatttgatccttgcaggactaccctttgcctcatttaaagtttacgaagattatcacatcatcttatttgatccttatggcaactataggaggttgacagagaaatgaaaagtcccacagctcttaggaagtctactttagacagctgtgctactgctgagttcgccttacttatttatttatttacttatttattttttttttagacggagtttcactcttgttgcccaggctggagtgcagtggtgccatctcggcttactgcaacctccgcctcccaggttgaagtgattctcctgcctcagcctcctgaatagctgggattacaggcgcccaccaccgtgcccgctaatgtttgtatttttttagtagaaagacagggtttcaccatgttggccaagctggtctcgaactcctgacctcaggtgatccatccaccttggcctcccaaagttctgggattacaggtgtgagccaccacgcccagcctgagccaccacacccggcctgagttcgccttattgtctagaacccaggtgaggatggagtgaaggtggtgggtgtggaagagcatgttagctttgcttctaggaaagtaagtggagctatcagcctgagctctgtgagcatgcataaaaggagtaacaagtcacttctctcaatctttttttttttttgagacggagtctcgctctgtcgcctaggctggagtgcagtggctccatcttggctcactgcaacctccgcctcctgggttcaagtgattcttctgcctcagcctcctgagtagctgagactacaggtgcgcaccaccatgcctggctaatttttgtatttttagtagagacgaggtttccccttgttgaacaggctcgtcttgaactcctgtcctcaggtgatccacgtgctagggcctcccgaagtgctgggattacaggtgtgagccaccatgcccagctcacttctctcaacctttgaggcatctcttgagttgctcaccaagaagagagggagaaaagagagcaaacagtgtacagtaagtcaagaagacgatgagtgtaatgtaacaaggtagggaagaccaagaaccttttggagcaagatggctacattaggatttctggtcagtcaggtcacataaataaggcagataggaacgttgacactgggaagacaccgttcccagaagccaaatagacaagactatctggccagtcagatacacggttaaactaacagacttttaaggaaaatgaatatgttatttgtacttacagtcaaccagccaaactattatcgatattattatatggcaacaacatagcatctttctagaaatattaatgaacaaattaggaattgtcataaaacagcaaaaggggcagaggaaatcaatgaagcacactagagtttaactctttcccttaaacaattgagtttttaaataagtaaatcctgtgactcccagactgaggcaggaggattgcttgagtccaagagttggaaactagcctgtgcaacatagtgggaccctatctctacaaaaaataaaaaattagccgagtgtggaggcacgtgccagtaatctcaactattccagaggctgaggcgggaggattgcttgagccggggaagtcaaagctgcaatgagccatgattacaccattgcactccagcctgggtgacagtgataccctgtctcaaaaaaaaaaaaaaaaaaaatataccattcatgggttttagtgtatttgcagagttgtgcaaccatcaccacaatcattttaaaacattttcgtcacctcaaaaagaaacattataccctttggcagttacactctattccactcttccctgagcccatggcagccactcatctttctttctatggatttgcctgttctggaccattcatacaaatgacatcaaacaatatgtggtcttttgtgtctggctttcacttaacataatgttttcaaagttcattcatattgaggtatgtgtcagtacttcattcctttttagtactcatagtattgcattgtatggatagaccagattgtatttatccattcattagttgatggacatttggattatttccagtcttgagatataatgaataatactgctttgggcattcgtgtacaagttttcatgtgaacacttattttcgtttctcttggggatatgcataggagcggaattgctaggtcatatgctaactcttgtgtttaaccttttcaggaactaccaggttgtttttcaaagcagcggcactattttgcatttccaccagcagtgtgtgaaaattccaatttctctatatccttgacaacacttgctatatgtacttttgttataagccatcctggtgggtatgaagtggtgtctcattggaattttgactttcattttcctgatgaccagtgagtatattttcatatgcttcttggccatttatatatcttctttagagaaatgtctactcagatcctttttctatttgttaattgggtttttttttttttttattaaagttgtaagagttttaaaatatattctctaggccgggcgtgttggctcatgcctgtaatcccagcactttgggaggatgaggcaggtggatcacctgcagtcaggagttcaggaccagcctgaccaacaaggtgaaaccccatctctactaataatacaaaaattagccgggcatggtggtacacgcctgtaaccccagctactcgggagactgaggcaggagaatcgcttgaacccttgaggcagaggttgcagtgaggcaagatcgtgccactgcactccagcctgggtgacgagagtgaaactccatcttcaaaaaaatacaaatgaaaaaatatattctctatacaagtcccttatcagatatatgatttacaaatattttatgccattctataggttgtcttttcactttcttgatggtgttctttgaagcagaaagtgttaaattttgttgaagtctaatttgtctttttaaaaaactggttgtgcttttgatgtcatatctaagaagccactgcccaatccaaggtcacaaagatttaagttttcttttaagatttgtattattggccaggcatggtggctcacacctgtaatcctagcactttgggaggccgaggtgggcggatcacctgaggtcaggagtttgagaccagcctggctaacatggtgaaaccctgtctgtactaaaaataccaaaaattagcctggcgtagtgacaggcacctgtaatcccagctactcaggagactgagacaggagaatcgcttgaacccgggaggtggacgttgcggtgagctgagatcacgcctttgcactccagcctgggcaacaagagcaaaacactatctcaaaaaaaaggttgtattgtttaattatttagctgttacatggaagtctttgatctattttgaattagtttttatgtatggtgtgaggtgagagtccaacttcatctttttacatgtggatatccagtaccatttgttgaaaagactagtccttcctcattgaattgttttgcatcctttttttttttttttttttgaggtggaatcttgctctgttgcccaggttgtagtgcagtgactgcaacctccgcctcccaggtttaaacaattcttatgcctcagcctcctgagtagctgggactacaggtgttggccaccatgcccagataatttttgtatttttagtagaaatggtgtttcaccatcttcgccaggctagtctcgaactcctggcatcaagtgatctgcctaccttggcctcccaaagtgctgggattacaacatgcccggccatcatccttttcaaaaataaattgatcaaaaggtgagggtttaactctgagctttctgttctgttccattaatctgtatggttttttttgagatggagtctttctcccaggctggactgcagtggcactatcttggcttactgcaagctccgcctctcaggttcacaccattctcctgcctcagcctcctgagtagctgggactacaggcgcccgccaccaagcctggctaattttttgtatttttagtagagatggggttgcaccatgttatccaggttgttctcgatctcctgacctcgtgatccacccccctcggcctcccaaagtgctgggattacaggtgtgagccgccgtgcctggcccattaatctgtatgtttatcctgatgccagtaccacactattttgcttacaattgttttgaagtcaggcagtttgagtcttccagctttgttcttctttctcaagacttttttgaccattctgggtcctctgcatttccaaacaagttttaggatcaatttgtcaatttctgcaaaaaaggaggcttaggtgggattttaatctatttggggattactgttatcttaaaaatactgtcttcccatccatgaacatgggagtctttccatttaaagtttaagttttacatttcttttgttaaatttatgcataagttttttttttttttttttgaggcggagtctcactctgtagcccaggtggagtgcaatggcaagatcttggctcactgcaacctccacctcccaggttcaagcaattctcctgtctcagcctccctagtagctgggattacaggcgcccaccaccgtgttcagctaatttttgtttttgtttttgagacagactttcgctctgttgcccaggctggagtgcagtggcgcgatctcagctcactgcaacctccgcctcctgggtccaagcgattctcctgcctcagcctcccgagtagctgggattacaggtacccaccaccacgcccggctaatttttgtagttttagtagagacagggtttcaccatgttggccaggctggtctcgaactcctgacctcaggtgatcacctgccttggcctcccaaagtgctgggattataggggtgagccactgcacccagcctgattttcgtattttttgtagagacagggtttcaccatgttggttaggctggtctcgaactcctgacctcaggtcatccacccgcctcagcctctcaaagtgctaggattacaggcatgagccactgtgcccacccagtattttattttttgatgctattattaattgttttcttatttttagtttgttcattgctactgtatggaaatacaattgatatttttatattcaagatcatgtcttctgcaaatggagctaattttacttttttctttctttttttttttttttttttttgagacggagtctcgctctgtcacccaggccggactgcggactgcagtggtgcaatctcggctcactgcaagctctgcttcccgggttcacgccattctcctgcctcagcctcccgagtagctgggactacaggcgcccgccaccgcgccccgctaattttttgtatttttagtagagacggggtttcaccttgttagccaggatggtctcgatctcctgacctcgtgatccacccgcctcggcctcccaaagtgctgggattacaggcgtgagccaccgcgcccggcctacttttttctttctaatttgtacgccgtttatttcattttcttgcctaattggtctgtttagaacttccaggacagtgttgaatagaagtggcaagagtggaaatccttgtcatcttcttgatcttaatggtaaaaacattatctgtcaccattaagtacgatgctagcagtagcttattcatagagtccctttttcaggttgaggaaattctcttttattcctagtttgatcagcatttttgtcatgaaagagatatactgtatttttgaaacaatctcatactgaaaagtttttattgtacaatatagtgcaaataatttttttcctgaaccaattacagtaatttgaccattggatactttagtgtgattttctttttttttttttttttgagacaaagtttttttcttgttgcccaggctggagtgcaatggcactatcacggctcaccgcaacctccgcctcctgggttcaagtgattctgctgcctcagtttcccaagtagctgggattacaggtatgtgccaccatgcctggctaattctgtatttttagtagagatgggatttcaccatgttggtcaggctggtcttgaactcctggcctctggtgatccccccatctcagctcccaaagtgttgggattacaggcgtgagccactgtgcccggcctctttagtgtgattttctatatcatcacaataccatcagaatcagaaaattatcattgatgaatagaaatgagagtgggcatccttgtcatgcttgttcctgattatagaggaaaggctttcagcttttcactgctgaatacgttcattgtttgcttgtcttccatggctcttattgtactgaagtacacaatggaggtattccttgtatacctaatttgttgagagtttttaccgtgaaaggctgttgaattttgtcaaattatttttctgctctatttttccccccttttttcacagctcctgcatgtggcatctgaaagctatctgtgaagaggtatttttctgtttgttttttttttgagatggaattttgctcttgttgctcaggctagagtgcaagagtacagtggtgagatcttggctcactgcaacctctgcctcccaggttcaagcaattcttctgcctcagcctcccgagtagctgggattacaggcatgtgccaccacgcttggctaattttgtatttttagtagagacggggttttcccatgttggtcagactggtctcgaactcctgacttcaagtgatccgcctgccttggcctctcaaagtgttgggattacaggcatgagccactgcacctggccatctttttttttttttttttaagacactgttgcattcttgtcagcctgattggagtgcagtggtgcaatcatggctcactgcagacctaaactcttgggctcaagggacctttctaccttagcatccctgagtacttgggaatataggcatgtgccatcatgcccagctgtttttgtagagacggtatcttgctgtgttgcccaggctagtcttgagctcttgaattcaagccatcctcccaccccagcctcccaaaatgctgggatgacaggcatgagccactatacttagccttttttctgcatctattgagatgattgtgtggggttgttcccccttcattctgttaatgtggtatatcacatttattgatttgcaataagtgtgttgatgttgaaccatccttgcattgccgggataaatctcacttgatcaaggtgaatgatccttttaacgtgctgttgaatttggtttgctagtattttgttgagggtatttgcatcaatattcatcagtgatattggcctgtagttttccttttttgatgtgtctttgtgtagttttggtatcagggtaatactggcctcatagaatgagtttggagttattccttccttgtctattttttggaataatttgagtagaattggtattagttctttaaatatttagtagaattcagcaggaaagccatgggtcctgggcttttctttgctaggagactttttattatggcttcaatcttgttacttgttggtgtgttcaggttttggatttcttcatggttcaatcttggtaggttgtatgtgtctaggaatttatccattttttctagatttttcaatttattggcatatagttgctcataatagccactaatgatcttttgaatttttgcggtatcagttgtaatgtctcctttttcatctctgattttgtgttgtctctctttttttcttagtctggctaaatgtttgtctatattcatcaaggttattggcctgtagttttcttttcttgtaatgtccttgtctggctttagtatcagggtaatactgatttcataaaatgagtttggaggtattctctcttcttttttggaagaatttgagaaagattggtattctttttttttttttttgagacagagtctcactctgttgcccaggctggagtgcagtggcatagtcttggctcactgcaacctctgcctcccaagttcaagcaattctcctgcctcagcttcctgagtacctgggactacaggcgtgtgccaccacacctggctaatttttgtatttttaatagagacaggatttcaccatgttggccaacctggtctagaactcctgacttcaggtgatccgccttcctcagcctcccaaagtgctgggattacaggtgtgagccaccatgcccagcctgctttttctttttcttatttatttatattgctatgaacatacatttatcttaacttacggctgaaaattcagtactatcgttctttgttttgttgctcaaattattatggcttggacccttaggagtttcttcattttggctcctgtgtattttgaataagccccatcttttttagagtattgttttacttctgttctagactcatatttttcttgccctagcccttgaatcaatcacttagttccttttattggaaaataatttttttttttttttttttttgagactgagtcttactctgtcacccaggctggagtacaatggtgtgatctcggctcattgcaatctctgcctcccaggttcaagcaattctcctgcctcagcctccaggtagctgggattacaggcatgtgccaccatgcctggctaatttttgtatttttagtagagatgggagttcaccatgttagccacactggtctcaaactcctgacctgaggtgatctgctcgcctcagcctcccaaagtcctgggattacaggcgtgagccaactcacctgagcagaaaataatcttcgcagaccaagatctgggcactagatgtgctcattgttgctgaggtgtcattgcttctagtggccggccagtctagtgcctctggtggacagccacatatacacgtttttatatttctatgtctttttgtatataataaaaatataagtttgtattgatacctttgattccaacttagtaccacaattgtagccttctcccatttcttatttataacatctttttccaacaatgagaacactggatttcattttctacaatttactttcttatttcctcaattctagtgtacacatagtttcataattgctagctcacctgtgagaaacatttttaaaataggtcacaatatttgcatgtagttctttttctcttaggctttattgtatccagtcaaaatccagctttccatagttaagttcttttcttttacactccttcaatgtgattatgttactcatttatagttgttaggttagtttgttagaatattgattgtttctcaccccacccccccatcatggttggttttattattgtgataaagaatatgtaacataaaatttatcattttgacctttttgtgtgtgtgtatagatggggtctgactatgttgcccagactggtctcaaactcctggcctcaagtgatcttcctaccttggctttccaaagtactggggtaacaagcatgagccactgcacctggcccattttgagcatttttaagtgtattgttcggtggcagtaaatacatccacgttgttgtgtaaccatcaccatcatccatctctagaacttttttcatctcaccaaactgaaactctgtacccatcaaataataactcaccatttcccctcccttcagacccttgcaaccacctgtctgttttctgtctgtgaatttgactactctaggtaccttatataagtggagttgtgtagtatttgtccttttgtgattagctgatttcttttctttttttttttttttttttgagatggagtcttgctctgtcaccaggctggagtgcagtggtgcagtcttgcctaactgcaacctctgcctcccgggttcaagcaattctcctgcctcagcctcctgagtatctgggactataggtgtgcaccaccactcccagctaatttttgtatttttagtagagatggggtttcaccgtgttggccaggatggtctcgatctcttgacctcctgatccacctgccttagcctcccaaagtgctgggattgcaggcatgagccactgcacccagccagcttatttcatttagtatgtcttctaggttcatatggtagcatgtgccagaatttttttcctttttaaggctgaataaattttattgtataaactacgttttgtttactgattcatccatcagtggacactggcgtgacttccaccttttggctgttgccagtactgctgctatgaacatagctgtacaaatatctgtttgagtctttggtttcatttcttttgtatatgtatccagaagtggaattgttagatcacatggtaattctatttctaattttctgaggaactgccatacagttttccatactgctgtaccattttgtattcccactagcaagtgtgcacaggttccagtttttctacatcctcacctgcacttattatttattctattttattttttaatattattttttgagaccgagtctcgctctgttgccaggctggagtgcaatggcacgatctcggctcactgcaagctctgccttccaggttcatgccattctcctgcctcagcctcctgagtagctgggactacaggcgcatgccaccacgcccagctaatttttatatttttagtagaaacggggtttcaccatgttggccacgattttttttttttttttttttttttgagacggagtctagctctgttgcccaggctggagtgtagtggcgctatctctgctcactgcaagctccgcctcctgggttcacaccattctcctgtctcagcctcccgattggctgggactacaggcacctgccaccacacccggctaattttttgtattcacagtgtttttaaaataattatcctaattggtatgaagtggtacttcattttagttttgatttgtacttttctaatgattagtgatgttgagcatctttttatatgcttattggccatttgtatatcttctttggagaagtggctttttaagacctttgcccatttagaaattttttgttgttttgttgcagattttaatatattctggatattaaccccttatcagatattttttcccactccacaggttgccttttcactgtgtcctttgcacagaaattttttattttaatataggtcagtttatttatttatttacttatttacttagtttttgagatggcccaggctgacgtgcaatggcgtgatctcagcttgctgcgacctccacttctcaggttcaagagattctcctgcctcagcctcccgagtagctgggattgcaggtatgcgccaccatgcccagctaattttgtatttttagtggagacggggtttctccatgttgttcaggctggtcttgaactcctgacctcaggtgatctgcctgcctcggcctcccaaagtgttgagatgaacttttaacttggtggagtgttaaacagcatggtcattttgtgtctaaagacttgggtttgaatcctagctcttctattttatacctatgtggttccaaccaaataacttttctgagctttaatttccccatccagtaaagaatgggactaataggatctatataaggggtttattgaatatattatatatatgtataatatataatagatttattccctaaacaagtatatgtgccacaagatactgactgagtattcagtaagcatctgttctgacatactggctttgcttctttctaagcttaaccccttcacttacgtactagattccttactctaggacaaggttcctgtaaagtttccttctctctttctctttcattatcagtttttctcctctctttatgtaaatcttttgtggcttagatgttgattgattgattgattgattgagagatatgtagatacatagatgggagtttaattatagaagcgttctgtactttaatgaggctgtctcttggatttaagtggatagaattggttgcattgattttcatccattattttgggggtaataaaatcagaactataagctagggtctttcatccttagcactattgatattttgtgccaaaatcttttttttttttaagacacagtctcactctgttgcccaggctggagtgcagtggcacagtcttggctcacacaacatccgcctcccagattcaactgattcttgtgcctcagcctcccgagtagctgggattacaggtttgtgccaccatgcccagctgatttttgtatttttagtagagacagtgtttcaatatgttggccaggctggtttctaactcctgacctcatgtgatccgcccgcctcagcctcccaaagtgctgggattacaggtgtggatcatataattctttcttgtgggagatatcccatacagtgtaggttgcttagtggcatccctggcctctactcactatgtgccattagcaccttcagttgtgacaataaaaaatgcctctagtcattgccatatgtcctcagcgagggttggtgagtgggaatagtcacccattgagaactacttactataaacactggctcatctatagcaattataaagggataattatttacctggtttcctaatagtcttataaagtataatcctattatcagcctacctaatgaatgtttttgacctccagagatgacaaataacatctggaattcacataagtatgtgttaagaatgctggtaataacatggtggttatggaggtggttcatttgcaccttagccactgcgaccataataatgatgatgattttataataatcaagttaccattcatggatgactactgtgtaccaggaactatgccttggtgaagtttatataaacatattttacaggagaaactctgtgaaaggttgtctgagtgtgatgcaactataggtgcccctgtcaatttaatgagccatgtatacatttcatctgactctttttttttttttttttttttttttttttgagatggagttttgctcttgttgcccaggttggagtgcagtggcacaatcttggttcaccgcaacctctgcctcctgggttcaagcgattctcctgctcagcctcccgagtagctgggattacaggagtctgacaccacgcctggctaattttggtgtttttagtagagatggagtttctcgacgttggtcaggctggtcttgaactcccgacctcaggtgatcggcctgccttggcctcccaaagtgctgggattacaggcatgagccatcgcgcctggcctcatctgactcttgattgtcaaaactagatgaggccaagatgggcacgatggcacaccatcctacttgggaggctgagatgggaggatcgcttgggcctgggtgttcaagttcagcctgcgcaacatagggagaactgttttttaaaaaaacaagctagatgaggccagaaagtctggtttgaccagaatagtccagtagtatccagtgcctcaggagcagagaggtcatctggtaaaggtgagggtatgtaattaccaaacacgggctggaagtggtcagtagatcagtgcagacagtgaagaatcacacctaaggcaaagtacaggtcaagtttcctgaggcagcattctctgagttgggcagatcatcttctgtacatatgagtggaactgaactgtctgtacagaatacaggttgagcattccaaatctgaaaaattcaaaattcaaaatcagaaatgctccaaaattctaaattttttgagcaccaacatgatgctcaaagtagatgctctatcggtaaatgtaatgcaaatatttaaaaatccaggaaaatctgaaatacatctgatcccaaccatttttgataagggatatttatggtttgctttttttagaaggctatcttgagagaattacttacaggtcgataactcttcccagcctgtgatttgaattgatctttagaaaccaggccaggtgcagtggcttatgcctgtaatcccagcattttgggaggccgaagcgggcagattgcttgagcccaggagttcgagtcatcctgggaaacatggtaaaaccctgtctctactaaaaaaaaaaaaaaatacaaaaaattagccgggcatggtggcgtatgcctgtagtcccagctgcgcaggaggctgaggtgggaggatcacctgagcccaggaagtcatgagccatgatagtgccactgcactccagcctgggcgctgggagtgagaccctatcttacaaaaaagaagaagaagaagaaaaccatgacaggtgtctttaagctgcccttgctgttctgggttcatgaagcatctgtgggaggttgcccatatgtaaaattagttgagtttgaagaaatgttaacgttatatggtattcttttaattttgttttaaaaataatttttctcattcaaatcctgaattagaagttgtttggtataaatattgaaaattgttgaggggagaatttattcaaagtttaatcattttgcttttatctatgttatacttagctattagttactggaagtgtcaagttttatttttagatcttaactagagtctaaagtaattactaaaagctagttttcaaataatatgtaatgagtaaagtcctgagttaaaagatttagcatactgaattaacttagttgactgatgctgtacttacatgggcctcctatttcttgtggccaagatagcatcaacagaaataattgaaataattgtctcgagacacacctgagaaggtttaattatgttaattgtactactgttccttagtgagccttcttagtttagcacctctttggtatgggtagctgctttccagtattcaagtggtactatttccaggatgatttttggcggttgatatttgtaatatcagtaattcatgtatctcccccttccttttattttactgtgttttatgatattttgaaaagctctatttttaagaacttttaattgaaagatggcagtgttcaacttaatgcatttttacaaactgaacgtacctgtataaccagcacatgacctggaaccccaaagcccccttcattctcctttccaaatccaatcactactcccactcccaagggtaatgactatcctgggatgaaagcatagcttgattttacttgctcttctgctttgtataaatggaaggttacagtatttactcttttgtgtctagcctctttcactcaaccctatattagtgagattcatgtttattgtgctttgttctatattattcctttttattgctgtatactttccattgtgtgcatgtacaatttatcatttcactgttgattgtcatttgatcatttctggtttgggctagtttgaatagtgttgctatgaacatataaatgcatttatttgggttatttatctgttactagcattgttaggtcatagtgtgagctttagtgtatagtgccagtttttgaaaatggttgtacccataccaaattgcatgtctgtagcagtgtgtgagagtttgttaacttctctaacacttggtatttgccctctttttctttttagccattctggtaaatacatagtagtatctcagaaaatcttctgttgggaaagttagttgcaaatttgggacctcctgggactttaatctgtcacaccaacttcatgccaccactgaagcctcaataatacctcttcgtccagtacagtccctttgcttagggcaagcatgatcttcagtctgcactcagaattagcagatattcccagataagaaaatgaatgatgattatcagctcacctcagaggttgctcacctttctggaactagtttatccaatccttgttgcttgcacaactttccaacatctttgcaaatgtgatttttgtaatttatcatggccttttctagttgttgaagctgaattagtttgccatgagctgctatatcctacccagaagtggaagttgtcagtagattcttgggattttctatatacataatcatattgcttgagaatcatgttaatttttttcctctttcctttcccatctctatgtgttttgtttctttttcttggtttatttggactggttagaactaccaatacaatgttgaaatagaagaagtgttagtggcatcgtgttggtgggggagggcgggagattgtttacattaattgtaatgtaaactattgagtataccattgagtatgataattaccatagtttctatgatattctttttaaaatggataaatttaattccagtttgctgactttaaaaaaatacgtgaatggttgttgaatttaagtacttttctgcagctaccaagatgattatgattttcttctcttttttctgattatatggtttaatgtatacttttaaaaaatagtatacttaaacccattcatgtctactgtagtacttgtttttatgtttcctttcatgcatgagtcagttctgtacatatactctcttgctttaaacctgttatacatttaatcctgccatgtattatggttcttagctaagggattcctttggtagattagaagcattgcagactccccctactacctgtgttttatatgcagaagaaggagtgaaaaactgaaaactttccttggagcatttattttgacctagtttaatttttgtttcctggcttttgttatttgggattgtaagggaagaagaatggggctagggaaggactgtgagggtgataaacaggagctggagaataaaccagtgtatgatttccttcagcaccacctctgtccctccccttcccacgcttcctctttctctgtagttccagctttaccacaatcagcttgcccttgggcaagtcacttaaccacttatcttttcttttttttctttttggttatactttagtatgcaagcactgactgagcttttgtttctcatttggagttgaagaggatgactgcgaacagctgttacgacccaccacttaaggagaatggaaggattaaatgaacagtttataaagcctatgacactttaaaaaaatgagagtgattgttaggattagatttgtacaatggtattctatctttttttttttttttttgagatggtgtctcgctctgtcacccaggctggagtgcagtggcgcaatcttggctcactgcaacctccgcttcctgggttcaagtgattctcctgcctcagcctcccaagtagctgggattacaggcatgcgccatcatgcttggctaatttttgtattttcagtagagacagggtttcaccatgttggccaggctggtctcaaactcttgacctcaggtgatctgcccacctcggcctcccaaagtgttgggattacaggcgtgacccacggcacccggcctatatcttacatttcctaacagccctgaaaactccatgtggaagaaggatacttgtgaaacacccttggtacccaaactacaagaaactttctatagttacctctgtggcacaaggtctaaaacagaggttttattcacttgcttaaactttataacgtttctataaagtgttctgtgttaagcttgtcacttttggaatgaacaaccattgataggcatgcatcaaactaaaacaacatttgcaaaagcacttctctctagaatgatactactttagaatttctttaaattgcaaccaccctacttcatttaagggtttatttgttgatcataaactcctttccagagggccaggacatagagttacgatagctgatattctgcctggcacaaaggcaaaacatcaggggtgaataagtttaacaggattttattttgtacccaactttatgatctagctggtgtatgaagttaggtgtacctgttcctataactgaagagctttgggtaggtggttccctaagacatgttgttattttttagttcatgtattattaatagtacttggggtatatggtcttaagcattaatatgttgaggcatccttgggctcataccaccactatcttgtcaccctctgcttatttacctctaccttctgcaaggaactgggaatgttatgtggtgtggttttgattccatgccttttctctctgggctcctcctccacatgcatgagtgctataggccttgacttccacctatggttttgggagtgggtggatggattccacagaagggaggttttggtttgtaattcactattaacgtgatcactcacctgttcaggtttataggtcattatttctaaatcaggtctgactttaaatttgtgagagaccaatggaggtgagtaggaagcaaaaagcaaagtaaaatttcccaatctgctactatattgatcatgaaacactttaaagagagatgagaaagactgaaaggtcacctgaataaaagattctttgcagagtaaaatttactcttggtgtggaatttggaaatgaccttatatttggggatttgtttttgcaaacctgaaatttaggcctttacatgtcttagtccatgatcttgacctggagttcctgttgtagttcattagcaccacgcttcttgtttttccactgtattcctcatgctttttcctcattgtcaggcttcgctcacgaattcccttctactttgattgattgtccccttgccttttatttggtgtgcttctactccccctcctagacagggttactcccatagtgccccagggaaagttttgtcaccacacttaaaagataatgacctgggctgggtgtagtgtctcatgcctgtaatcccagcactttgggaggccaaggcggcagtctcttgcgcccaggagtttgaaagaccagcctggacaacatggcaaaaccccatctctacaaaaaaattacctagagactaggcacggtggcccatgcctgtagtcccagaactttgggaggccaaggcgggtggattgcttgaagccaggagttcgagaccagtctggccagcatggcgaaaccctgtctataaaacaaaacaaaaaattagctgggtacggtggtgagtgcctatagtcccagctactggggaggctgaggtgggaggatcacctgagcccgggatgttgaggctatagtgaaccaagattgtgcctgggtgacagagtgaaaccttgtctcaaaaagtagaaaaaaaagataatgacctgtttttatatctgacttcatcactagtctaggttccttcaaaacaagggctctggtgtactcatttttgtaaccatttgcatagtgtgatgcctggaccttaatagacttccttaagtgtttgtttggatgtggaggggaggctggacacaggactgggagttaagactgagtttgattataactttttgttgtatgatcttgggcaactgatttattaaactccttgaggttcagtttccttgtatgtaagatgaggggatctagcccacctggggatcttgttaaaatgcagattatggctcagtaggtctctggtgggttctgatattttgcatttttaacaagctcccaggagaagccagtgtagccagtccctgaactgcaaaggactagataacatctagtggctcttccagcttttatcttctgtgattatagtcattgttttaaattctgagcagaatgacaaaatatatgttgtaattactaaatatctctccagtttatcagagtgctgaaaagacagttctgtgccttatgaagtttccagtgtatgacaatgtccctagaattgaaagtaattttattgctcctaaaattttaactttaacaagttaaaaatataaatgtctgggaaagcatttgagttaacactagctcgtcatctaaattgtcagtatgcttgcttattggagaacatttgccataaataaaattactcttgaaggctttatgctaatgatctgaagtagatagacaggtgatcttatgagtataaatacagagacaggcaagctgttgatgaattcatcatcagaggaggaagagttcccagtcattgtcttcacttctccagaaggtgagaatcaaatcgttgtaggaagtgtttatagatatgctataggtaaacccagactttgtattgaataggattgccaggaataggttttgtttgaaaatgttgctactatttcttttgggttttacttcctcaagaagtcatgatatttgattagggagtattgccaccttggaaatttttagcttttcttgatcctttgtacactagtagttggactaatttttatgtgtgacttgtagaataaatctatctctttattctcaaccatatcaggaatattaatccagcacaacttcagcgtccaaataagttatatccatggctgtgatggattctgatcatttgcaaatagttcttactgggctggaactgttctgtctacctacatcctactctgtgttttacaatttaaattttttttgtctaaaaaaattaaaatccagataagggaagttgaaaccctgaaaaaaagtacagagtgtagcttatagttgaggtggttatctttatatagagtttttaacctcccacatagtaagttaatttatacttccaaagtgagctatatttcatctcccctctacacagttgtggtttggacagaagttttagaccatcatcatcatcatcattattacatttcagtcatttgtaatttttggttacctaagtcaaactcactaggtcaagcaccacagaggaaattgagtataactatcaccagaagaccaacctcttttctccctggagtagattcttgcctggggtaagttcaggcattctctttggtacacacggaggttcttattaacactgccgttttaacactgcccttcttgctgggtgtcttaatggaggctgccttgtggcttatttagtgttatgtcgctgctaagttggattcatttttaaaaatagtttaatttatattgaactcaaattaatgtttttgaaacaaactgtgtacacactgaaggcatttgctgcagtctaaacagattgtcctttgccaaatgtcttaaccagaactgttttttttttttttcttttgagacggagtctcgctctgttgcgcccaggctggagtgcagtggcatgatcttggctcactgcagcctctgcctcccgggttcaagcaattctgctgcctcagtctcccaaatagctgggattacaggcacccgccaccatgtccagctaatttcttgtatttttagtaaagatggggtttcaccatattgaccaggctggtctcagactcctgacctcagatgatctgcccgcctcagtctcccgaagtgctaggattacaggcgtgagtcactgtgcctggcctaggactgttatctgaggttccttgtacccctctttagagtctaaaatagaccatttcctgtcaccctgagaattattactattttaccgcaaacaccattttttagacttggcactcagatattttcatcgttctttgccattgaattttagtggcttatggctaatgagaaagaaaataatttttttttttctttgagacaggatctcactctgtcgccaggctggagtgcagtggcttgacctcagctcactgcaacctttgcctcccgggttgaagcgattctcttgcctcagcctcccaggtagctgggactacaggtgcacgccaccacacccatctaatttttgtatttttagtagagacagggtttcaccatgttggccaggatgatcttgatctcctgaccttgtgatccgcccgtctcagcctcccaaagtgctgagattacaggcgcgagccaccgtgcctggctgaaaataattgttaataatggcttttcagtttcaagttgcttttgaattttccaacagtgacctactaacatagccccaatatgttagtattatattttatgctttgtttttcaagaaatgatttttactataaataggagaccattagcactatctgttgtaaagtactatgtgatttttaaaaccagtattatacatttagtgtgatatgttgatctttaaaattccgtatctcctctcctctaaagaagatctatcagcactgtaagagagggcgagagaaaaaaaaaaaagatctaggggatctaggggacagtcttagtagcaacaaacccctttgatttatcaattgttatgcagattggaagaatagttataggtgatttcagagaggaaaatataatggtgaaagcaaactagattttttttcctctctcaatctctagagattttaacacagaaaaaacttatctaaaataattgtatgcctatttcttccccctcttacttacgtttaaatctagctgtcagtctttaaggaacagtcagatctgtttagttttgtcttgtaggtaagaagcagatgtgctcatagagggttatttttcctctgtagttccagatatgtttttggctttacttaattatatactggcagtatattaacctgccagtagtagcagtttcagtttttttttttttttgtctattaagcaatctccagtatagacaaaagttacatctaccctactctcaaaaaacatgcgtaccccagactctggaaagtcccttcactgcactaattgcaaccaacatccctacatgattctgtgtactgatagtcctttcccatcactgtaatctagcctttgtagagaagaaagaagactgtcagaggaagccctttgcaagagaatttttctgacatttctgttaagattgccagacttttcctgctctggcattcagctcttcagcaggttacaaaaatacttggggtccttccaactttttgtttgtttgttttatgtccttgttattgctgccgtcataggacagcaccggtctcttattttatattagaactttacaggattgttcctcattgggggttgttccctatgggagttgttccctatgttctgagcatgtgtatgtcagacctgcgagttccagatctaccctatctttcaatatcatcagtttgagcagtgtttgggctaacccagtaataattcttacacaacatctcacctcacttattctagcagatacctctgaaatagtgtgaaataaaactctattctaggtcggggcgtagtggctcacacttgtaatcctagcacattgggaggctgaggtggacagacggcttgagctcaggagttcaagaccagcatgggtaacaagttgaaatcccatctctacaaaaaatgcaaaaaattaactgggtgtggtgttgagtgcctgtggtcccagctgcttggggggactgagacaggaggatgaggtccacttgagcccaggaggttgaggcctgcagtgagccaaaatcacgctactgcatacaagcctcggtgacaaactgagaccctgtctcaaaaaaacaaaaacaaaaccagcaaaaaaaactctattctagttctgcatacaggccaacacatggtctaacccaccctatctcaaatccctatccatgtgctctttcagatacaaatatggctccatgaaaacaattttgttagcatttctcagaaagaatgaggggtaagagggaggaaaggaatgactgcaccctgtagagtggctataaaaggtttccttcagcatttagaaaaatctgatgatgtattatatgggtttacttgacgttattgtttgtccttaaatataaagtcacaaatcaacaattaaaaatctctttcttttcagtttccaaaaaaagacttacagcaaaatgaataatccagccatcaagagaataggaaatcacattaccaagtctcctgaagacaagcgagaatatcgagggctagagctggccaatggtatcaaagtacttcttatcagtgatcccaccacggataagtcatcagcagcacttgatgtgcacataggtacaattgaaaattgtgaattaagctttgttttgtttcattgacctaatgctgacatttattagaactttccatacgtgtttaaatactcaatagttaccggttccatgtaccttattttataccagaaccctcgtaaagctattggtaaactgcagttgtttcagtcaaataatcttacattttctaaggacatcttgttaggttcccacctaaggtgacctagcagcaaaaattcattgccattctttacagtaacagttatgatttttttttttaccgtggtacatttaatataacattcctttttctttttctttttttttttttgagacagagtttactctgtcgccaggctggagtgcagtggcgcaatctcggctcactgcaacctctgcctcctgggttcaagcaattcacctgcctcagcctcctgagtagctgggactacaggcatgggcctccatgcccagctaatttttgtatttttattagagatggggtttcaccatgttggccaggatggtctcgatctcttgaccttgtgatctgcctgccttggcctcccaaagtgctgggattacaggcgtgagccaccgtgcctggcctaataccatatttcataggttcttgtgtgcacatttcttttttctttttttttttttctgagtgggagttttgctcttgttgcccaggctggagtgcaatggtgtgatctcggctcactgcaacctccacctcccgggttcaagcaattctcctacctcagcctcccaagtagctgggattacaggcgcgtgccaccacgcccgcctaattctgtatttttagtagagatggggtttctccatgttggtcaggctggtcttgaactcctgacctcaggtgatctgcccgcctcggcctcccaaagtgcagggattacaggcgtgagccactgctcccagccttgtgtgcacatttcttttttttttttttttttgagacggagtttcactgttgtcgtccgggctggagtgcagtggtgtgatctcggctgactgcagcctccacctcccaggttcaagcaatcttcctgcctcaccctcctgagtagctgggattacaggcgtccaccatcatgcccagttaatttgggtatttttagtagagatgaggtttcaccacgttggccaggctggtctcgaactcctgacctcaggtgatccacccgcctcagcctcccaaagtgttgggattataggcgagagccaccatgccctgccatgggcacatttcttacacatttaatgttgctttaatcaggttgcttctttttttttttttctctgagacagagtctcactctgttgccgaggctggagtgcagtggcgcaatctccgctcactgcagcccccaccttcaaggttcaagcaattttcctacctcagcctccctagtagctgggattataggcgcccgccaccacgcccagctaatttttgtatttttattagagacgaggttttgccatgtaggccaggctgatctcaaactcccgacctcagatgatctacccacctcgtcctcccaaagtgctgggattacgggtgtgggccactgtgcctggccgagttgctttttatgtatgtgtacagttagtgggacagtgtttctttttgtcctctttgaaaaacttttaactcagtgtcattttagaactgaagaaataaggtaatattgaacaaataactactgcctaccataatgccttagactaccagggtgatttgcatatgtcatctaatttgtactcacacagccctgtaagatgggtatatattgaagcgattgagtcaagataggtacagtattgtgcttaccgtttcacagccagtagagtggtaacccccaaacgcatgctgttaacactgtgctgtatagtctcctgcaatgaaatcatgacaagaaaattctagctcttgctgggtgtggtggctcaagcctataatcccagcactttgggaggccgaggctggcggatcacgaggtcaggagatcgagaccatcctggctaacacggtgaaaccccgcctctaataaaaatacaaagaattagctgggcgcggtggtgggcgcctgtagtcccagctactcaggaggctgaggcaggagaatggcgtgaacccaggaggcggagcttgcagtgagccaagatctcgccactgcactccagcctgggcgacagagcaagactccgtctcaaaaataaataaataaataaataaaaagaaaattttacctcttaaaactgtgaatccagctctttcttcctctccggcatgtggggaaactaatgttcagagacactaagtaacctgcctgaggttaccaactaattagcgtcaagagcaggcactagaaaccagtcttctgactactgatttactttctaaataatatcattttaggtagcttgtgcttaactttctctgattatatagttggagttgtcatgctaacaagaactacaaatcacctgtacttactaactttcagcataggacaatgatttattatatacgtgttttctctttcaggttcattgtcggatcctccaaatattgctggcttaagtcatttttgtgaacatatgctttttttgggaacaaagaaataccctaaagaaaatgaatacagccagtttctcagtgagcatgcaggaagttcaaatgcctttactagtggagagcataccaattactattttgatgtttctcatgaacacctagaaggtgccctagacaggtaatgcagaataccctatgaattatccaactttgtgtacttatcacattaataataataattattatttccacagagatggcttcataatttaacaaaaggtattttaaacagtgtttttccctgtgttttctgaaaaagaaaaaatgagtgatgtcatattttaaatgagccttcaggcctacaaaatattttattgaggtatagaattttcagcagccctttccattctaactggtgttacatataaagcatgtgatgaggactaacctgtgataatgtcattgatctcttttcagacatacttctgttccagaatgctaaaccttaaatattctctcctcgttcatttccttgcttctcaaggatgcttagtagatacagaacgttttgacctgctgtttcaaccgtggggatattttgaaagtgttttctggagcaagctccattaggccgatttaatttcttggtcaaccgtggggatattttgaatgttttctggagcaagctccattaggatgatttaatttcttggtcaatttttttttttttttcagacggagtttcgcacttgtttcccaggctggaatgcaatggtgcagtcttggctcactgcaaccttcgccttccgggttcaagcaattcttctgcctcagcctcccgagtaattgggattacaggcatgtgccaccacgcctggctaattttgtatttttagtagagatggggtttcaccatgttggtcaggctggtctcgaactcctgacttcagttgatccacccacctcagcctcccagagtgctgggattacaggcatgagccactgcgcccagccttggtcagctttttttttttttttttggtcaattttttatacagctaacaatttctaatttttttgttgcatcagtgatttgattcattatttgactcaaataatggactacactctggtagtccaaagcattatggtaggcagtagttatttgtttatccttggtgaatatttatagttttctgtgatgccaaggtgtaattctgcaactttttggatctataatgaaatttggcagttttagtcactgtcggctttatttgcttacttttaataatagttattatattattgaaaaaacattatcaaggcaaggttatgggtttatgagatgtgctgggccaaagtagtctgtttcctacttattttattttatgtttcagtctttaggcagcagctttgaggtgtaatcatcgctaatatgtattcccagaagacttccattaattagttccctgggatcatacactgaatttcatctcttgctttacaaatgctgcagcagatgttcatataatagatctctgtatgatgggggatgtctgttacttggctcaaactaaaaatccacttgtataagaggatcatttaaaaaactttattatactgtgtcataacatgatcctttatctgggcctatccagctttggtatgtagctattagacatttttcccagcctggaagtattgaggtgggtaaaagatgttatgtgaccagaaatcatctgttttcatacatctttgattatagactccagatagatagagtttccccttgtggtatatgtaaagtacttagcatagtatcatattttcttatgcacttaaagtaaataacaagtaatgataatggcttctgtgacagctggactgtgaggcgtagtaactgagatgtttatggacccaagagttccttaggcccactgaataaagtagtcctattcagagcctctgctcttagcttcatctgaatcaagtcttattctataaaatgggatgtaaagtttcttaagaattactacaggaatcatgagttaaattcaacctgatatagaagagttaatttattagctgtaggtatcttaaagttaggtattattattaaggaatagcctcaagaaaggcatattggttacttatgttaaagttacataccatgttatttattgaatcactgcttattaaaattttatggactttttctcttatgatttcataaacgcccataatcatggcttagtcaaactatgtcatacctcaggttttttactgcattatgttttttcctactaattcaagtttgtttttctacataagaagaaagaaatattcaaattgagcctgttaaaagtaggtcacttgtttgtcctaaggtgcctgagtctaagtgaaattgcacctaaaactgtaaatttaagattggcctaaaaactatgacctgcctttttctttctttctctttttttttttttttggagcattagccacatgtaacaaagtttttatagacgtaccaaattaaaaatcttaaatagactgctattgtccataatctgccttttttggtgttaattttttaaattttcactgtttatcatctctggggtagatcaactcctctgcatttacctctgttcaacattagatttttcttctgttacatagcacttattttatactccttttttcttagtagcaatggtagttttgtttctgattctgcaaaatttacatttcctatctaataagttccaaaaatctttctaaaaggctattgttttaaaatgacatctttcaagttttaattatgtttcgtacccttaggtttgcacagttttttctgtgccccttgttcgatgaaagttgcaaagacagagaggtgaatgcagttgattcagaacatgagaagaatgtgatgaatgatgcctggagactctttcaattggaaaaagctacagggaatcctaaacaccccttcagtaaatttgggacaggtttgtcaacagctgctttccttgacctcatttaaacccatggccactgcatagtattatattttatgtatatataaaatatatttatgtatatatttatgtatataacccatggcatatacagttcatggcatattttacaattcaggatagatttcaaaattccacatttctacttacatcctgttcaaatagggttctaaacgtttaaggagcagagcagttagagttgtgaatagatattaaccagcattccatatggagaagataatagattcttttattccaaagcctaccttccaaagtacttttttttgtaaaggctcactgtagtattgttgaatccacttgtcctcattgcctctacttctgctaatccagatgcatagcgtctgctatggggttagctctgtgggagataggacactgtagaagacacacaagatcccagctcttaaagtgctacaatctcctagagggagataagaaatggggataacaggaagtagaataagataaacgtggagactcttgactttataattgtacctttttcttcaatttttcattaaaaaagtacttgtttaaatatttaaacagtacaaaagcatttagagtaaaaataaaagcagaaacacaaagtctgtctattctttatctattcctgccagtcatgctcaccagaggtaatcattgttaacagattgctatacttttaaaatactgttttgggtattataaaagtacataagaataatgataatatattatttaatgtacttagaaatttatgcttaaaaattcacttctctattatgagaacatgcttattttataaattagttttgggaactttttaaaaccataaagacaactttctttaagtttggatatcatcctaatgtatccaacagcagtcagagaaattagcatagctttacagaattaggagttttcaaaaattatactttgaagcagtgatattatattctttagaaccgtggtacttggcactcaatattaacataattgccaagatgaatagtgtggttcttagaatgtctacataatgctgaattttttaaaaagtgatttttgtggagaacatcagtatacatggtatgtcaagaatggaatgtgagttttaaaaaacaaatatcaggccaggcatggtggctcatgcctgtaactgcaacactttagaagaccaaggtgggaggatttcttgagttcaggagtttgagaccagcctgggcaacatagtgagacactatctttacaagaaaataaaataattagccaggcatggtggtgtgtgcctgtagtccaagctacctgggaggctgaggatggcttgagccagtgagttcaactgcagtgagccacaattgagtcactgcactccagcctgggtgatagtaagaccctgtctcaaaaaaaaaacaacaactttttttttgttttttcaaaagcattacattcaaatggttatttatttatttatttatttatttatttattgagacggagtctggctcttatcacccaggctggaatgcagtggcctgatttcagctcgctacaacctctgcctcctaggttccagcaattctcctgcctcagcctcctgagtacctgggattacaggcgcccgccaccatgcccggctaatttgtgtacttttagtagaggcggggtttctccatgttggtcaggctggtctcaaaatcctgatctcaggtgatccgcctgcctcggccttccaaagtgctgggattacaggcgtgagccactgcgcctggcgattatttaaagtagtccttttggtatgttagatacttacacaaacaatgctgctattttgcagaatatgttggagctcctctttgggagttgcctttttttaaatagcttcactggtgacaaattataatcagcataatcagaaagcagttacacattttccagaaataaatccagtgaataaggtgagtagtgttacttctggtcacaaacaaggaacatttttttttcctgtagaggtggggtctcactatgttgaccaggctggtcttgaacgcctggcctcaagtattcttcctgcctcgcctcccaaagtgctgagattacaggcatgagccaccatgcctggccacaagaacaatcttaaaatattctatagaagggtttcaggaatgatgggcaaagagatacattgcatggcatatccatatgggtgaagtttcagggcatatttctttttatagcctgaaaagctaggcagttagcaaagtacaaggtaatataaacagctgagaaacaagtgagccagactcaatacacagtacagaaaatgtgatataagtaatgcaaatgtcaagttaccttctgattttagaattataaacttacgttgaattttttggagtagaagttctgtgtatttttaaggtcacaggtacatttgaaaatttgatgacagttgtatgcccttatctcagatattatgcatattgaaaactttgcaaaagtgatcgttgcagtaggttccttgtcagaaattcatgctaatttatgtagattgctttggcctcagatgtttttgtgagtgtgggccactttgttcatcaggggattttttgttttgttttgtttttttgttttgttttttttgagacagtcttgctctgtcgtccaggctggagtgcagtatggtgatcttggctcactgcaacctctgcctctcaggttcaagcgattctcctgcctcagccttctgagtagctgggattacgggcacccaccaccatgcccagctaatttttgtatttttagtagagatggggtttcaccatgttagccaggctggtctcgaactcctgacctcaagtgatctgcccgcctcagccttccaaagtgctgggattacaggcatgagccatcacgcctggtctcatcaagggattttgatttaaaataataataccagaaaaaggtgtgtatttttgaatgaataaaaaccacacattgtattatctgttttaagaaaactttacagtaagatgtttgtccctaacagtcggttttcatgctcagaaatagtatagattagtggctttcaaactcttttttgtatacaactcatagtaagaagcacattttatttagcaattcagagtacatatatgtgtttgtgtaagcagctgaaacaaaattttgtcaaacactatcttacatcatgggatgtagtctggcactttcccttatattctgtttttttttttttctagagaaactctgatctgctaatactttaaatgcatttaattacaatataatgggtcctgacccacagttttagtagtccaaagtgatagacagtagactctgagcattggataaaacacagcactcatccatgaacaaaaataaaccacaacaataaaaaactttcaagctgattaaaagctattgtcaaacttcatgattaatggaggtttcaaaggatttctgttgaaaaaataaggatgcccactatcacttttgtttggctatacttacaggtattaatcattacaataaatcaagggggaaaatgtgattataagagatggaaaggaagcacaacaaaacctatttccttatttccatatgataggattgcctccataaaaatactgaagaaaatcttcagatcagtcattaaaaataattcagcaaggttgccagaaagaagacaaacacactaaaattgcgttctttggagtacagtggcgtgaccttggctcactgccacctccgcctcccaggttcaaacgattcccctgtctcagctccccaagtagttgggattacaggcacgtgccaccacgcccagctaattttttgtatttttagtagagatggggtttcaccatgttagtcagcatggtctcgatctcccagcctcgtgatccacccgccttggcctctcaaagtgttaggattacaggcattagccaccgtgcccggccatgttcttgtatcaataatcaattacaggaaaatgctggggtaaaaattatttcatttgcaatatttaacaaagctgtaaaatattcagaaataaatccaatgaaagagttgcaagaaatatgtaatggatataaaagaatgcctaaatggggaggtatatcatgcacatggatggttaaactctatataacataaatgtaaatatgccccaaatttctctaaattcaatgcagtgccagttgaaagtcctgtaagtttttttttaggaattgtataatctcattataaaattaataagagagtaaaaggccaagaatagctaagataattttgaggaacaaggaaagctacttctaccaggtaccaagacttattataaagttctagttgttacagtagtagaattgaagcaggggtgcatgaagatacaagtagaacagattataggccctggaaacatccacaaacatatggaaacttgatataaggcagaggtacattacaaatgaaaaaaatatagttctttcttaggactttatgtagactttctatagactacagacatgtgccactgagtctggttcgctacaacttttaaaagaaaatatatgagaattttttttatcttcagatagaggaaatgttcttaaacacacagaaaaacccatgaagatagagatgaaccataggtttagagataaacttgacctcattgaaatttaaaatccttgttcaaaagagacacaaaaagctagatgtggtggtatgcacctgtaatcgcagcttctcaggaggctgaggcaggaggatggtttgcacccagaagttcaagaccagtctaggcaacatagtgagaccctgtccttttttttttttttttttttttttgagacagggcctcaccctgttgcccaggctggaatgcagtggtgcaatcttggcactctgtaacctcctcctcctgggctcaaatgatcctcctaccccagcctcccaagtagctgagactacacgcacacactaccacactcagctaattatttaatcttttgtagagatagggtctccctatgttgcccaagctggtctcaaactcctaggctcaagtgatcctcctgcctcagcttcccaaagtgctagggttacaggcatgaaccatcatgcccagcctcttaacttctctaagccccagttcctttccacatcaggttgatgccaatattaaatgagattgtgcatatgaagcccataataatgttaaataaatcatattaatagtataatacctgattggtagctgtgaaaggacagtaggattctgaaaaagtccttgtcttgattccatatagattttaggatttttttttctatttctgtgaagaatatcattggtattttgataggggttgcattgaatctgtagatagctttggatagtatggacattttaacaatattagttcttccagtccatgaacacaggatgtctttcctttttgtgtatgccctccttaatttctcttattagtattttatagttttcattgtagagatcttttactttactttttttttttttttgagacggagtcccgctctttctcccaggctggagtgcagtggcgccatctcagctcactgcaacctccacctcctaggttcaagtaattctgcctcagcctcccaagtagatgggattacaggcttgcaccacaacgcccagctgatttttgtatttttagtggagatgaagtttcgcatgttggccaggctggtctcaaactcctgagctcgagtgatctgcccaccttggcctcccaaagttctgggattagaggtgtgagccactgcgcccagcctgagatcttttacttttttggttcagtttgttcttagagggcttttttgttgtgtgtttgttttttgttttttgtagctattataaatgggattgctttcttggttttttttttttttttttcagattgttcactgttggcatatagaaatgctactgattttgatatgctgacttttgtatcctgcaactttactgaattcatttatcagttctaacaggtgtttttgatagagtcttcaggtttttctaaatataagattatgttgtctacgaacaatgacagtttgacttctttccattttggatgccctttatgtcttgtctaatggctctggctaggacttccagtgctatgctgtataaagtggtaaaagtggggatgcttgtcttcttcagatcttagagcaaaggctttcactttttcgctgttccatatgatgttagctctgagtttgtcatatacagcctttattgttttgacatatgttccttctctacccagtgtgttgagaacgtttatcatgaagtgatgttgaattttattgaatgcctttttcagcttatggtgtttgtccttgattctgttactgtgatgtatcatgtttttgttttattttgttttgagacagtctcactctgttgcccaggctggagggcaatggtgcaatctcggcttactgcaacctctgcctcccgggttcaagtgattctcttgcctcagcctccccagtagctgggattacaggcacacgcctggctaatttttgtatttttagtagagactgtgttttgccatgttggcaaggctggtcttgaactcctgatctcaagtgatccacccacctcggcctcccaaagtgctgggattacaggcatgagccattacacctgaccctgtgatgtatcatgtttattgatttgtatatatttgtatatatttttgtttgtttgtttgtttgagatggagtctcactctttcgcccaggctggagtacagtggtgccatctcggctcactgcaacttccgtgttcaagcaattctcctgcctcagcctttcaagaagctgggattgcagcgcccattaccacatctggttaatttttgtatttttagtagagacggggttttgctatattggccaggctgatctcaaacttctgacctcaggtgatccacccacctcggcctctcaaagtgctgggattacaggcgtgagccactgtgcccagcctgatttgtttatgttgaaccatctttgcatccctgagatgaatcccacttgatcatgttgaatgatatatattattatatataaaatatatatataatataaaatatattataatataatatatattatatattatataaaatatattataatataatatatattatatattatataaaatatataatatataaaatatattatataaaatatattatatataatataatatatattatatattatataaaatatattatatataatatatattataatataaaatatattatatataatataatatatataataatatattatatatatttttttgagatagagtctcactctgtcaccaaggctggagtgcagtggcacaatctcagcttaccgtaacctccacttcccgggttcaagcagttctgcctcagcctcccaagtagctgggattacatgcctgccaccatgcccagctaatttgtgaattgaatgatatttttaatatgttattgaatttagttggtatccactttcactttttctcttcattattcacatatgcctttagtttcatagttcctgataaactagaaaccatttttctgccctattttgtttttttgtttgcctctcaatggaattaaagtaggagcagttgaatgtttacaagcaggtttagaatagtaaaaggaaaaacttagttctggttattccttactgatctgtttctccaaacataactctaccgacactgtgggagcaactgggtttattcagctgggagggaaataaaagaaggaggtcaaagagtgagtgggaacaacaaaacaggtactccttcatgtataggtagaatgaaaggcacagttgaagacaagaatatagagggtggagctgtattttaggtgtgcgtgacttttttttttttttttttttaagactgagtcttactcttgtcgcccatgctgaagtgacatggcatgatcttggctcactgcaacctccgcctcctaggtttaagtggttatcatgtctcagccacccaagttgctgggattataggcacataccacaatgcctaactaatttttttttttttttttttaagtagagaccatgttggccaggctggtctcgaattcctgacctcaggtcatttgcctgccttggcctcccagagtgctaggattatggtgtgagccactgtgcccagcaagtgaaaagaaagaaaatttctttcttttcttttctttctttgagacagggtttccttctgtcattcagactggagtgcggtcgcatgatctcggctcactacagcttccatctcctgggttcaaacgattctcctgcctcagcctctgaagtagctgggattaaaggcaggtgccatcacacctggctagtttttgtatttttagtagagacagggtttcaccatgtcgcccaggctagtctcgaacttctgagctcaggtcatctgcctgactccgctgctatttactctagtatgcttattccaagttcataggattataaatataaatgagcccaaattttctctctctcagttaataagtaatttttttagtccccctacatgtaaagtgcattagaaaatgcaaagaagtgtaactagtgtcattgcactcaaggtgctgaaagtttagttggggaagcaaggcaaacccaggatttcactgagtgtaattttagctttgattttccaggatcatcatctctccattttcttcctcctttttcttgctaatttttattgagtgctatgctaagcactttacgtggattatttaatttctaataattctcacagtaaccccagtaggtagatgctcatatttccatcttacatgagtagattaagacttaagataattaaattgccttgggtccctcagcttttaagtgctggagtcaggatctgtgcccagatttggagcttttaaacactattctattttgcatgttttagtgttgcccagaatttatttctccaggatcttagcggagatgcagtttcacttctcctgaagtatagataagatttccttaagcagaaggaagagccattcaaggggaaaaagaaaaggaactaatatttgttgtatttgactaatgttttagtcttgcagggagtacagagaggagagagatagggtggtagtggaactatctgtataggttatggaattcaattatcaagtcagtctgaactcaaagcctatgttcttcatgatagtaattaagttgacccccaaaaccatgacatgaagaaaagaccaaggagtgagcctggtttcttttggagaacatgagttaggatagtttgagtataacaaaggatgcttttgcatagagaagtaggaaggaatagaatagaaaaagagaacccaataaaattgtggaatatgaaccagagggtagttcagtgactcctgatcctgtggtaaacataataacacaccaaatcagactctaatacaagttcaattacttttttctctcttccctcccacccttatttcctcttttcttcccttcaccattttttttttgtgaagaatttaaaacatacacaaaagaacacaaaatactataatgaccctatgtgtgcatcaccctgcccctggccaattctgtacaatccacatttccattcacccttttgtattattttgaagagattctagatatcattttgctcataaatatttcagtatatatctctaaaacatagcaattcatttttaaaaacataaaaataccattattgttaccattattatcaaatatccagttagtgttcaaatttctagtgttcttataaaaatcattatttttaaagtttatttgaatcagagtccaaataagtattacatattagtgattgtttgatatgtctttcattattattattattattattttaatttttgtagagacaggatctcactatgttgtccaggcttgtcttgaaatcctagtttcaagcgattctcccaccttgaccacccaaagtgctaggaccccaaagtgagtcacccaaagtgagccaccactccagtctgatatgtcttttaagtctctttttagtttaagagttcatccttcatctcttcctctactccttcccctcactcccctcttggaatttatttattgaataatcaggttgtttgttttatcgaacttctcatagcctagatttttttttttttactgcacccctaacaatgtagtttaacaagttcctctgtcttctgtatttctacaaattggcagttggatatagaggcttgatcaaatttgtgtttgactttttgacaagacatcttcataggtggtgatgtatttttccattgggcatacaatgtctggtcatttatgatgttgcaaatattgattctcagtgcatcacctccctaattttggtttttctaatgctaattctattattccatctcttttgattaacttgagtactgctgtaaaatctccttttctactatttggctagtcagtggtacagttactgtgggaaaggcaggataaatgcttttattccattccatttatttaccaattttcaaaataatgaattggttcgtcagcatccttcagggtgactaatttgttttttgagtatcacatagactcatggatgtaaaaacatttcatatattttagtccatgtaatcatttattgttcccttagcttttccatggattttgttactatcttttttctcgttactgggatatgtgtctgtggaaaactagaaatttactgaaaacaagagctggaccaatcaagtgtaggagtgttttctgatggcatttaagaggttttcacttaaagtccccttttataactcatatcttgtacttgcatatacttactcagctgcagaggaattgtcggtttaaattttgtgggaaaattcacatatatcaaaaggctttagtctctcacttccaggatttttagaagattgctatagcaagaagaaagggctttttaaaaagtttataataattccaagtaactagctataggtatgttagcctaactttcaggatcttgggttttcagagaacatataaaattataatgggttataactatcaagttgacctttccctgagaacatactattggagaaacctgtggtttctaagacgtttctaaaacttaaaactcattccttcccagtataagaaatatattgctggcttcagaattttccaggaaaataaattttattcccttgaaaatcagtattcatatacattagtgctgagtttgtaagctttatttgttctaaacagaatttaaaatagttgttaaaatgaaaatataaagtagcacttactggattttacaatttaccaacccctcttcgcatccattattacatttcttaggcttcacaaaaccccatgttaatattcagtaattattgtctgatagatgctatgctgagccttaacatggattatttatttatttatgagatggagtcttgctctgtcacccaggctggagtgcagtggcttgatttcggcttactgcaacctccacctcccaggttcaagcgattctcctgcctcggcctccccgagtagctgggactacaggtgaccaccaccatgcctggctaatttttgtatttttagtaggacggggttttgccatgttggccaggctggtctcaagctcctgacctcaggtgatccgcctgcctcagcctcctaaagtgttgtgattacaggtgtcagccaccgcgcctggcagattatttatattttaattctcacagcaatcctgtgaggttggtcctcttattatgcccatttatgaataagtaaactgaggcgtaagagaggttaagaaacctgcctgtgtctcacagctaggaaatgaaggagagtcagggattgagcctttccttgcttttagcacctggacatatatccatattatccctattttacagatgaaataaatgaccccttggagatatttggagacttttccaaggttgcttaattagcacatgatggagtcaggacaagaatccctgaattcctaaatgccaaggcagtgttctctcctagcaggcgtagagtggaagggtcacagtaggtgagcaaccctgctcctccattcactgctggagctcacctggatgcaacagagccagaaaggtaggattcaagattttagtacaagtagcagcattttaatttgacataaatgacccagctgaatgagcacaaaattaggacagtatgtgtctagagactgaattggtatttattatcccagccttattcacgttgttctccatacatggtttcttaggtgttggggggcagtcatctggaccatttactcagcttctagccacaatttctatttttttctctggggagtacatctttttgtataatgattcactcagaagccaagagtccttcctacaattcaaattgtaacagcagtagctactgtttgttgtttattttccgttgtttatttattaagtattatgttaaatacttcagtatttttacagatttatgatgtagttgtcatacaaagaggtaggtacacagacatttgccagatcattctctgtcacactgcttaaagaaagagaacgttacaaatgcactttgagcatccggtgtacacttcagttgcattttccttcctgctcctgagagataaccactatcttctttaatgattatcatttccgtgtttatagttttatatgtttttaggtttcatggaaatagtattttattgtgtgtaatctctgccgcttgtattttttcattcaacattttgttttgtaagagttgtccatattgatgagtattcctctgataatttttgtattttattgctctttgaaaaattcattgaatgactgtaccactatttattcattttcctgttaatgaaacagtgttactatggaattgttgtacatgtctccttgtacacagacttctctggatacatatatccaggagtggaattactatgtagtaggatatggacatcttcagattgactaggttgtttcctgtagcggttgattcaagatgcactccatcaggcagtgtctgagttctcattctctgcatactaaacaacagttggtgtcgtaagactttaacatttttgttaagtaatagtcttatactttttttacgtgtatttttctcattatgtactgtaagtccactaatgtcagttgaggagattgagccacagagaagtaaagtaacttgttcaaggccatgcagtcagaagatatctggccccaggagaatcaattgaatcttggaggtggaggttgcagtgagccgagatggcagtgtaaagcactaaggagcttaagcaaaactccctctagaactgtggcttttagaatcttcatttagtagaaaagaaaggcttcatcaatactcaaatttcaccttgatacgagagaacttcaaacattctccagcaaaaggcctttttttttccctaaggagttaggactatgggtatgcacctaagagcatctggacccctcaggtagagtgagagaatagagaatgtctcaggacctctctgggcagtaaagcagaactaggtcttatttatttatttatattattttatttatctatcaatcaatcagacagagtctcactctgtcacccaggctggagtgcagtggtgtgatcttggctcactgcagtctctgcctcctggtttcaagtgattctcatgcctcagcctcctgagtagctgggatgataggcatgccaccatgcttgccaggctggtcttgaactcctggcctcaagtgatgcacctgccttggcctcccaaagtgctgggattacaggcatgatccactgtgcccagcttgaactggtcattagtgagaaaatgagagaactaattaagaacctggaaccaacctgggtaacatagaccctggttctaccaaaaaaaataaaaataattaaaaaaatagctggacgtgatggtaaatgcttgtggtcccagctactctggaggctgaggtagaaggactgcttgagcccaggagatcgaggctgcagtgagctgtgattacaccactgcagtctagcctgggcaacagagtaagaccctatcttaaacaaaaacaagaacaacctggaaacttgggtgataggctacttctagtgagtatgaatgcatatgattactttgtgactaggaaaaggttaatgagttaaggttaaggttacttgctaggctgtttcttgcacattctgtcttcactggatctgttaagcattctgggacaggaatcttagtactgtgcagcactactgagctaaagactgagtttgagagcgccatctggtggctttctgtagacatccaatttcatgaaagagggactttcccagtgcccctatatcagatattataaaaacacaagaaaaaaaaattaaaccacttcaagaacatactctaccatagttttatctctgcagaagaaagacaggatctcacttagtagtgtaagtagaaccaataataaaagttattatgccaggatcttaggatatttccagtcaagatgccattttggagagacaccgatcattggaatttcatctcccagtccctaatttgcaaggtattatttagagaatttgactatttgtttttgacttacatattttaccctacttgaattagttattaagatttcatgagagctgttagtggtacactacatacatcgctggagagttataaaaatagcattgcatcctttttttaaccagtctagatcacatctatgagaattcacatcacaaatttaatggtttggcccaaaatagtaaatttctttccacaagtaacttggcaagttctaaaaaaatccctcagtgactctgttcaattaattatggagtacatagggaattgaaaattaaaataagcatgaatggaggccatgtggatcttattttgtcttttaagcactcataatacctactatctcatagggattttaagaagtggagatatagatacagatatagacatatttttttgagacagagtctcactctgttgcccaggagtgcagtggtacaatcttggctcaatgcaacctctgcctcctgggttcaagtgattctcatccctcagcctcccgagtagccgagactacaggtgcccaccaccatgcctggctaatttttgtatttttaatagagaggggttttcaccacgttggccaggctggtcttgaactcctcacctcaggtgatccacccatcttggcctcccaaagtgctgggattacagatgtgagccactgagcccagccaagaagtataatttttttttttttttgagacggagtttccgtcttgttgcccaggctagagtgcaatggcacaatcttgactcggcgtgatttcggctcaccgcaacttctgcctcctgggttcaagtgattctcctgcctcaacctcccaagtagctgggattacaggcatgtgccaccacgcctggctaattttgtatttttagtagagacggtgtttctccatgtttgtcaggctggtcttgaactcctgacctcaggtgatctgcctgcctcggcctcccaaagtgcttggattataggcgtcacagtggccggctcgaccgtgcacatnnnnnnnnnnnnnnnnnnnnnnnnnnnnnnnnnnnnnnnnnnnnnnnnnnnnnnnnnnnnnnnnnnnnnnnnnnnnnnnnnnnnnnnnnnnnnnnnnnnnttggtggctcaagcctgtaatcccagcattttgggaggccgaggcaggcagatcacctgaggtcgggagttggagaccagcctgaccaacatggagaaaccccatctctactaaaaatacaaaattagccgggcgtggtggcgcatgcctgtaatccagctactagagaggcagaggcatgagaatcacttgaacccaggaggcggaggttggggtgagccgagatcacgccattgcactccagcctgagcaataaaagcgaaattccgtctcaaaaaaaaaaaaaaaaaaggccgggtgcgcggttgctcatgcctgtaatcccagcactttgggaggctgaggcgggcggatcacgaggtcaggagatcgagaccagcctggctaacacagtgaaaccccatctctactaaaaatacaaaaaattagccaggtgtcgtggtgggcgcctgtagtcccagctacttgggaggctgaggcaggagaatggcgtgaacccgggaggcggagcttgcagtgagccgagatcacaccaccgcactccagcctgggcaacagagcaagactccgtctcaaaaaaaaaaaaaaaagacacttttaattccgtagagacgactatagtttaaaatgttgctggtttgtactctattatcctgtttattcacttaacattcaaataaatttgagttattctgtgtattagaactttatttttaaagttcatcttaagcaatatcagtgataattacaaaactttaaaagtccacatattttgctttttctaagaaatcccttttcttcccttccaggtaacaaatatactctggagactagaccaaaccaagaaggcattgatgtaagacaagagctactgaaattccattctgcttactattcatccaacttaatggctgtttgtgttttaggtcgaggtaagaacccttacaattttttatagaattggataatataagtttttaatgttggctttttcacagtgttagaagatggatataagatagagctgcttatttgctcagcatcttttgaaaatgatctacttgttagagaatacataggtggggatttttatgtttaaatcattgtgttcccaaaagaagtttaagtggagatctgaaaaaaaatacaaattactacagtaataggtgctctaagcatataaaagcaaggcaagcccagcctgggcaacatagtaagatcctgtctctaccaaaaaaaatttttttaaattagtgggatgtggtagtctgcacctgtagtcctagctgctagggaggctgaagatcgcttgagcccaggagttaaaggctgcagttaaaggctgtgatcaccacaccactgcactccagcctgggtggcagagagagatctcatattaaaaaaaaacacacaaaaaggacaaagattggcagatttgaccttataacaattcaaaaaactggaaaaaaaaaaagcagatgatgataaacttgggaaaccatttggaatgtaaacaatggtttgatttttaaaatgcagattaactactaacattgtttcctgctgttaaattatcacagttttgttttgaagtaatacccactgccgatggtgttgcttttttatattggtaatgatggtatcaattgctctagtctttctggagggcagtttaacagtatcagtcttaaaagtaaagatgcatttttacttttaaaaatgcaatctcaggaaataatcagagttcaaataggagatataaaaggatgtttctgtcagtatagtacatattagcgaaaatttagaaatctaaatgttaataggagattggctaaatactgattttataattgcaaatagaatatcttatagaaaaataacatttcctattctactttccatcttacctgctttttctttatagtattaatacctcaggtattaaatatttgtgtgtttttgttgtccaccctaccaaagtgtaaattacttgagaatagaaactttgttttgttcactgctttatcctcagtacctgggctcgtgcttggcacatcataggtaaatatatattgaatgaataaacagttttatgacagcattttaataccatgggaagatattcttaatatattctcatatatatgaatatatgttcttatatgtgcatatataactaaacatttttaattaatatatgtatattatatataagaatataatttttaaaatgttcttaatatattaaagagaaaacaaaagctgtttacaaaaacatgtgctatatggtcccattttgggatttattaaaaattccaagacatatcccccccacaaaatttttaaaaactctaatagggtccaggcacagtggctcacacctgtaattccagcacttcggaaggccgaggcaggtggatcacttgtggtcaggagtttgagaccagcccagccaacatggcgaaaccccatctctactaaaaatataaaaattaaccgggcatggtggcgggcacctgtaatcccagctagttgggaggctgaggcaggagaatcacttgaacctggggggtggaggctgcagtgagccaagattgtgccactgcactccagcctgggcaacagagtgagactccatctcaaaaaacaaacgacaacaaaaaacaccaaaaactctaatataccatatatggtgtaggtaaaagacaaaatggaaaagcatgtactagaaatttaataatgttgtatagtaattaagaactcacattctacagtccaacaacctggcttttcattccaaatataccacttacttagctgtgtggctatgagctaacaaacttacttaggtttttcaaacttcagttttcacatttgtaaagtggtgggtggtacattgtacctgttgtgaggtttaattgagataatacaaagtgtttagcaaggtgcatggcacatagcaaatgctccataaacagtagtagccactctagcacctttataatcatgaaattatggtaacttttgttaccataatttagcttttgtttctaagttttctgctattggcaaatgttacttttatagttagaaaataaactattttttaagttggtagcaagaaccagggtgtaaaatggattcagggagtgaggacagtaaaaaaaaagcatactctgtaatgctatgtgcttgcttcaggtaggtgggtttagaatgttaaaatatcacttgctgtttagaacccagtcctgggattaggtgccaaagctgggtgtttttttttttttttaatctatgttgtatttgagattaaacacatgatttcagtaaacatttaataggcaagtaacaatggcaatagatgaatcaaacctgatccctgtcctcagaatgttcttggtttagtggaaatgacagaataagaatctaaaaaataaagtgtctcaattctctgatccatacacatcactctcccattgtgactgacttcctgtgctgaaccagagagagatgtctttacagtatagaggtatgaggaggaaactggatctcttggaggattaaaagataatccactccttcttttgacgggaggagagaggaagagtaaccatgtggaaggatctctgtcacaagggaacaaaaagtttttctgttcttgcctggagctgtctccctagttgtggaagcactaattatctgaacacttgccacataggtaatcatcaagtacagacactgaggttgccaaaccttgatgatatgaaggtgagtgggactcagttccctgatgtctggggagctcacagtttagtggggtagacagactgtgcaatagtgtttagctcccttacctttaaaaagtgacactgtgaatttatgcttttagggtagaaatacgcaagaggaaagatacacctggtagaaccttgctcagggtgttgctgtcaccagtactgcaggcccacaaacctttattgactgctcaccttgtttcaagtcatatgtcccatctgcaaaaagatgtctctgacatctcttgctacaatattccttctccattcctaaattcacttgtcatataataggcagccactgatctgccttttatttggctctggacattttggagtccttcatacatgtcaaaaaaattgaggcaaaagtaggtatattttataaataaaatgcaaatgcctacacttaaaggcacaaaagagaattttacaccatataaaggcagctctcaaatagtcatttagtactctcgagaattcatggaaaagttccaaatgggtcatagaatatcaaggcaagaatcttatttgattcaaatgcttactgacagtaacaggttatgaatgtttataccatttataaataacctatttttgaggagacagaatcaagatgagaggttatcttgtttataaaaagacaggttttggccaggcatggtggctcacatctgtaattccagcactttgggaggctgaggtaggcagatcacttgagctcaggagtttgagaccagcctgggcaacatggtgaaaccctgtctctattaaaaatacaaaaaactaacagggtgtggtggcacacgcctgtaatcccagctactggggaggctgagacatgagaatcacttgaacctgggaggcagaggttgcagttagctgggattgtgccactgcactccagcctgtgcaacagagcaataccttgcttcaaaaaaaaaaaaaaaaagtttttttttttttttttaacactgctttctttttaggataatagtaatttgtacaaatggaaaaaatttaattccacacagaaaggtataaaataaaaagcaagctgttctttattccatcctatgactgctgtgccctcttctcaaagatctaactcatttcttgttatacttccaaaagtagaattttgctaatatcatatatatgatatatgtgatatatcatgtatgtgatatatatgtgatatatatcatatgtgtgatatgtatgtgctatatatcatatatgtgatatgtatgtgctatatatcatgtgagatgtatgtgctatatatcatatatgtgagatgtatgtgctatatttcatacatgtgagatgtatgtgatatatatcatatatgtgagatgtatgtgatatatatcatatatgtgagatgtatgtgatatatatcatatatgtgatatatatatacacacacacatataaaatgtgcattttggagtccttcatacgtgtcaaaaaactaaagtaaaaataggcgtcttttataaataaaatgcaaatacatttaaaggcacaaaagataattttataccatagaaggcaattctctgtctatgtataaggtgaacattatactctatctgctagtagttcagtatatatgcctgttgggaatcatagtcatttttccaaatgcaattattattgtttctaatatttgttttaattttattataatacttgtgaaataatattttgaataatatttgtgaataattttttaaagtagaaacagataggtgtgaggtgtaatcattttcacattttcctttcagtagtactgagacttttcaggagatcctaagattttaagcactccctgttggatgttatgattcgcttaagttctgttttccttgtctgttttcttgtagaatctttagatgacttgactaatctggtggtaaagttattttctgaagtagagaacaaaaatgttccattgccagaatttcctgaacaccctttccaagaagaacatcttaaagtaagtgcataaattttggtattttgtcttcttaatttatggacataatatatacctagtttaccatagaacaggtgaaaatttttggaggtttcattatttatgttgtgttttttttttttttttttggaaacagagtcttgcattgtcacccaggctggaatgcagtggtgcgatcatggctcactgaagcctcaacttccctggctgaattgatcctcccacctcagccttctgagtagttgggactacaagtacacactaccacacctggctaatttttgtatttttagtagacacagggtttcaccatgttgccttgactgatctcgaactcctgatctcaagtggcccacctgtctcagcctcccaaaatgctgggattacaggcgtgagccactgcacccagcccctatgtagtgttttttgtttgtttgtttctgtttttggtttttttgacatggagtctcactctgttgcccaggctggagtgcagcggcgcgatcgtggctccctgcaacctctgcttcccaggttcaagcaattcttctgcctcagcctcctgagtagctggaactataggtgcatgccactgtgcctggctaatttttgtatttttaatagaaatggggtttcaccatgttggccaggctgaggtcgaactcctgacctcaggtgatctgtctccctcagcctcccaaagtgcgaggattataggtgtgagccaccgcacccggcccccatgtggttttaaatatttgtcgggataataaaatcaatctcacatttattaggatcatgaatcaccaaaaacatatcaatatgttctggtctttacatgctaaaagtagttttggtagctgtagtcttaatagactgttgaagctgttaacctgtacctgaagataagcattcaaaaccattaatatttagctgcatggttcagggggtcaaacatggactatataccgactgtaatgaaattccactaggagagtgctgagtcatttatttctttgtggtcagtgtatcattttctgtggcaattgatttgctcttaaatttgggattctcccatgaaaatcattcttcatagtttagaaatattttcttcagtaggagtcgtatatagctaatctctgtgatttgttttctccagcaactttacaaaatagtacccattaaagatattaggaatctctatgtgacatttcccatacctgaccttcagaaatactacaaatcaaatcctggtcattatcttggtcatctcattgggcatgaaggtcctggaagtctgttatcagaacttaagtcaaagggtaagtctcctgggcagcatcttctgagtgtccaccacatcttttcactctggctctcattttctcctgaatagtgtcctatgaaggaacattgttagatgtgaccattttgggttagtgagtgagatggtggttgttggcacgctgttgccttttttttttttttttcttttttagatagagatggggtttcgccattttgcctaggctagtctcaaactcctggtctcaagcgatccgcccatcttggcctcctaaagtgctgggattagaggcatgagccaccgcgcccagccagtagtctactcttgactgggaattgatttgaggaatcttcaggaaagcccccacttctgcaccatcttaaactgcttttctgaactgatttttttttcccaatcttttcgcaagaggttcattctgatatcttaggaacatacagtatgaatttttaaaatttttcttatcttcaaggaagccacatatgcaatcaatcgtattgatttcctttgaatgttgcaggctgggttaatactcttgttggtgggcagaaggaaggagcccgaggttttatgttttttatcattaatgtggacttgaccgaggaaggattatgtaagtattgattcacctttttacttttgaatgaaaatttactttctatgatgttttttaacttcttcatgctgtggatctgttttatgttgaaagctacaacactttaattcatacaacttatccattgtatttttcatatgtaacttggcctttgtttcatggatgattcttccccccttaacaactgatcattatgttgcacttgttaaatgtggacttggctttttatttgctcatttactgccccaacaccctttctgtcacatatctctgagcccagagggccatgtatgtgggacacgtaaagccagtctcagggaggtgaggactgcattttctaagagggaccatcttccacttatctgactttaccttaggagtgagctcactgctttgaaggattcaaggactgaatggtttttaagtgtgccccttttttccagtacatgttgaagatataattttgcacatgtttcaatacattcagaagttacgtgcagaaggacctcaagaatgggttttccaagagtgcaaggtacttttgtttcaccaaaatttttcttaaggaatctgtttttcaagagcaaatacatgtgaattaatttaaatttaaggcccagttaaacttttaaagtttttttcctaactgaagtctaaaattttgcaatgtataatagtattagttaaggcttagttgtactagtctgatttgctacttggggcacaactaaggggaaaggcatcgtgtagccctttttaggatggaaaagggaagaaatcaaatgcttttccatcactcagaagaaaatcagcagtttcttgagctggaatatgtcagggattatgttactccctgcctgaagctgcatgagctctgtcgttttcagatctttaaatctgtagcaaactctcaaagaagtaatgaattgctttatgtatgattgtgttattaaaagtgattttattattgtatgtatgggaagaggctggcttttttttttgcgtaaaacaaatggtgtttgtctttcaaatttttaaaagccttttaaaaaagggtttttaaaaatacgtgctttaaagcctatcgagattctcaaatgtattttagtatgagaaacatcctttttaactagataaaagtttaaaggtataatctctgcttctgaaaattatgacaataactcctaatctgggtgctgttctctgaatgagtcaccaaaatcatctatggtggaattgttggatctcacaaggttctttcacacagtttttctaaattctttggctattagtttcaacaacttaggctatcgagccatatcctgtatttgttattttcattgaaagttgtttacctattttgcttttggttttaagcctagattgatggattaaattttatacacattaagaaatttttaaaatattctatacatttctaaatcaagcatagccattttttcagaaagtgtgataaagttaaatatggagtagaaagcttatagtgcaagccaaacacttaaaaaaaaaaaaaaaggtttctaaataagggtggccgtatctaattggattaactttctattttaggacttgaatgctgttgcttttaggtttaaagacaaagagaggccacggggctatacatctaagattgcaggaatattgcatgtaagtttgttgttattttactgtatacattgctgtgtggagtatttcagcaatcttgcatatattttcagtaataagtgaatgattacaattgaagctgaggtataaagctttcaactttgtagcaacagggcaaatgttgatgtcaggagatgtttaaaatcttaattttcatcatcgtgaaatttattttatgtaatatttttattaaatatgcattttgcttattggctttaaatatatttcagttctacagcatatcaggtgttacttatatgaaagctattgatcatttacttttttaaaatttccattgctaccatcctagtctgagctatcatcatttcttgcttgggctaccatgatagtcttttacctgcgatccctattttcctcttggtccccattgtagtttatttttccaggctcgtgatcttttgaaaactaaaatctgaatgtttcactcctctgtttaaattccttcagtggtttcccaacagagttggcataaaatgcaaaattttccttggcctacaaggtgatgtggccccagcctatctggccatcttctataccactgtccagcccacctctcccatttgcattccactccaactgtactggctctctaattttcaagcattaagtttattcctcccccattgctattttctctacatgaaacactgttctatctgatctttgcctggctaggttcttatcatttcagtctccactcagagttcttctcctcagaccttctctgacctcccaatctaaaataatgcccctgcccctttttttattgttttcatagcatctctcactaacattacaatatttgtttgttgtctgcctccctcccaattacaatgtctgtgtgcttcttggaggacaaaggatttcatgtgtcttacctacttttgtatccatagtgtgtggaacagtgtctggcacatagtagatgttcattaaatatttattagatgaatgaatcagtcagtgtgtctcagtatattggaagttgctcttaccaaaaagcatcttctgcattgtttttctacactggccaaaaatataagccatttttttttccacagccgcttcctaaatgtttgtctaatttgtttcatagaaatttaggaggaaattctgttcataaaaatgtgtgtactttatattttaaaaatcctgtaggtgtcagcattttaatatcgaattttcttcattaacaagtactcagtttttaaccagaaacattcgtggttttccccgaaagaaatgtgattttgctctctacaatggaagtatgtttggggattaacagtatatttggcagaatcatcaaacaatatgaaactgcttaacaatgtggtaggaaagagacaacgatttagggctacagaaaatttttccaatggagtaaaatttaactgaagagagaaagggtgtacagtaatgaatttaatgtgttacagatctgctttaataaactatgtagtagctttgtatattttatttatttatattttcctttttaaaagtattatcccctagaagaggtgctcacagcggaatatttactggaagaatttagacctgacttaatagagatggttctcgataaactcagaccagaaaatgtccggtgagtcaccatacagattttactattatacactaaattttcaataatgattagaatctgaaaaaatttgaaattgtgaataaaatgcttttaaacattttatcaagcattacaaaagtagagaatagtataatgaagcaacaccaagcttcaaccattgatacatggccagtcttttttaatctatacccatccctcttcagtcatcccccttccaccctaaattattttgaggcaatatctctaaaagatgaggacatttttaaaaacaaatataattttattatcataaataaaatagaataataacctgtcttaacctggctttattctaactcaaacgcccaaagtatcagcccacctatctgactcatataagcaaatgaaggcaccctctttttcttaagccacagtaaagattacaatctcagaatcctcctgattgaccagtggttaacctggaaatcaaaagtccaaactcttatagtagcagaggtattcttgctagaggaaagtagtccttaaagtgcttgtgagccaccacatgatattcctcccataaaactgaatttcatctatgttttctaaagtcaaatgatagagggaatataattgaatgacatgttttacatttttaatttttctcctctgttagggaagtatttttgaaattctactggcaatttggttattgagtaagttttttggaacagttgttttatgaataagatcaacaatgtgatagaactttttgtaaaaaaaaaaaaatctttttgggctgggcgcggtggctcctgcctgtaatcccagcactttgggaggccagggcgggcggatcagctgaggtcgggagttcgagaccagcctgaccaacatggagaaaccccgtctctaataaaaatacaaaattagccaggcatggtggcatgcatctgtaatcccagctactcgggaggctgcaacaggagaatcgcttgaacccaggaggtggaggttgctgtgagccgagatcatggcattgcactccagcctaggcaacaagagtgaaactccgtctcaaaaaaaaaaaaaaaagtctttttgacagaactatcctatcagaatcttttcctagttaccattgtttgaacttttccagacatattatcaaagcttcattagcgataattgcatatatatgacttgcactatactgtttaggttgagaacaataattaatgtcttctaatgttcaggtgggcttggcctatctattgtcactcctaggtggttggtggactcgggtgactttcttctaggaaatactattagccagattttacctgacctcatgctaggattcagctaaatattctattttttgggaagccaaggcagaggaggatcacttgagactaggagtttaagaccagcctgagcagcatagtgacaccctatctgtatttaaaaagttttaatgatttttttatattatgatacagtgtttggatgagtacagataattatctagcttcaagaacaattttttatagagatagggtctcactgtgttgcccaggtggatctcaaactcctggcctcaagcagtccggcttagccccacaaagtgctgggattacagccgtcgtgagccactgtgcccagtctagaattttcttttcttttttcttactgagcctagaatttttaaattggaataagataccatggttttgaggtttaaaaaatatattaagggtcaaaatttagaagtctttttcaatgaaaataacatgtgaaattatttagaaattaaatttctggtttgaggtacccagtaggttacaatgtttcctacgcagtttcttgccaatattttaagtccccatttattgcctaatccttaattactcaagaattgattatgatacagaaaatcttactgaaaaactagacaaagttactgacagctgtgaattcattagagattgctgagttgatcattctgcctttaacagcaaatgctctttttcaactctagataatttactgaggaattgaaaaacgaagaaatctttccttttccattcagtgaacaacagagaaagttgtagattaaatatttgtataacgtaatatgttaagttattcatgcctgacgtagtttagtgggggatggcgagatatagttcacataatttaaatggtttaaagtgatatatgcactgatacacataattgcatatgtagaaaatcctaaggaatctactttccccttcaaaaatctggaaccaataactgaattcagcacagtcacaggttgcaaggtcaacatacaaaaatcaactgcatatctatatatagcaacaaaaaaatagaaaattaaaagaagtatttataatagcaacaaaagcataatattactaggaatgagtttaaccaaagataagcaagacttctacataaaaaactaaaaacagtagaagagagcaaatattagccgagaaaaatgaaagaagacctaaataaatggagaagcatactatagtcatacattaggagacttgatattattaatatgttagttctctccaatctgattcatagactcaatgtaatcataaccaaaatcctggtaggctgtttttctttttctttttattcatttatttagagacagggtcttgcattgtcacccaggctggactgtagtggcgggatcatagctcactgcagccttgacctcttgggcttaagtgatctcctgcgtcagcttcctgagtagctgggattatgggtgcaagccactatacctgtttgtttattattatttttttttagatggagtttcattcttgtcacccaggctggaagtgcaatggtgcaatctcggcttactgcaacctccgcctcccaggttcaagcaattctcttacctcagcctcctgagtagctgggattacaggcacccgccaccacacctggctaatttttttatttttagtagagatggggtttcaccatgttgaccaggctggtctcgaactcctgacctcaggtgatccgcccacctcagcctcccaaagtgctgggattacaggcgtgagtcaccgttcccggccttttttcttttttctttttttttttagacggagtctcgctgtgtcaccaggctggagtgcagtggcgcaatctcggctcactgcaacctccacatcccaggatcaagctattctcctgcctcagcctccccagtagctgtaaccacaggcacgcgccaccatgcccagctaatttttgtatttttagtagagacagggtttcaccatgttggccaggatggtctcgatctcttgactttgtgatctgcctaccttggcttcccaaagtgctgggattacaggcgtgagccaatgcaccggctttttttttttttttttttttttttttttaatgacagagtcttgctctgttgcccgggctggagtgcactagtgtcatcttggctcactgcaacctcctcctcctgggtttaagcaattctcatgcctcagcctcccaagtaggtgggattacaggcatgtgccaccaatgcccagctaattttttaatttttttgtagagagagagtctcactatgttgcccagattagtctcgaactcctgagctcaaatgatcctcccacctcagcctcccaaagtgctgggattacaggcatgtgccactgcacctggccttttttttctttttttctttttcttttttttttttctgagacaggatctcactctgtcgcccaggctggagtgcagtggtgcgatctcagctcactgcaacctctgcctcccaggttcaagcggttctcttgcctcagcctcccaagtagctgggattacaggtgtatgccaccacgcccagctaatttttgtgttttcagtagagatggggtttcaccatgttggccaggctgtttttccttttttcagaaattggttccaaaatttatatggacatacaaaggacctagataagtcagaacactccggaaaaaaaaaaaaatcaccaaatgtgggaggaattaaaccactagatttgaggacattagtataaagcttcagtaattaagacacggtagtattgacatcatatggatagacaaagaaatcattggaagagaacagagtccagatatagttccacacatacatggtcagttgatttttttgttgtgattaaaaaacaacttcccttttctctctgccttctgataatcactattctacattctgtttctatgggtttaactactttcgatacctaatgtaagtagaatcatacaacatacctttctgtgcctggttcatttcacttactataatgtcttcaaggttcatccatgttgtagcatatgacaggattccctttctttttaaggctaaatagtgttccattatatgtatataccatattttctttatgcattcatctatcagtcagttggggtttttttttttttgagatggagtttcactcttgttgcccaggctggaatgccatggtgcgatctcagctcactgaaacctccatctcccgagtttaagcgattctcttgcctcagcctcccgagtagctgggattacaggcacgcaccaccatgtctggctaattttgtatttttaatagagacggggtttctccatgttggtcaggctggtctcgaactcatgacctcaggtgatccaccgttctcggcctcccaaagtgctgggattacaggcatgagccactgcacccggccagtcagttgattttatttttgagaagagcatcaacataattgagaatggaaaatcttttcaacaaatggtgctgttctactagctgcgtatctatatgaaaaatgatgaaacttgacctttgcctcatactatttataaaatttgagatagatcatagacctaaatataaacactaaatctataaaacttccagaaaaaatagaaaaatatcttcaaaaccttgcgataggcaaagatttctcagatagaacatgaaaagcagtaaccactaacgaaaacacattgaccgtgcacagtggttcacacccataatgccagcactttgggaggcatagagggaggattgcttgagctcaggagttcgagaccagcctgggcaacatgatgaaaccccatctctaaaaaagtatgcaaattagcagggtgtggtggtacgtgcctgtagtcccagctactcaggaggctgaggcagaaggatcacttgagcccaggaggtggaggttgcagtgagccatgatcataccactgcactccagcctgggcaacagggtgagaccctgtcttaaagaaggctgggtgcggtggctcatgcctataatcctagcactttgggagaccaaagtgggtggatcacctgaggtcaggagttcaagaccagcctggccaacatggcaaaacctcatctctacggtaattccagctacttgggaggctgaggcaggagaatcgcttgaacctgggggccggaggttgcagtgagccaagatcatgccacttgactccaccctgggcaaaagagcaaaactccatctcaaaaaaaaaagaaaaaccaccaataaaatggacttcatcaatattaaaaaccgctcttaagtgatacatgcatttacttacatcattaaaatacattgaagaaaaatacccagaacacacactaatttttactttacttgccacactggttttaatttacttgcctcatttaggcaagtaaaacagtttaaatatttgtattttcctcagtgtacctatatttccaggggggaaaaatcagcctaaatccggttgaattttatcatataccttctacaaataaaacctcttaccaacatgaggagaaagagctatagatttactaatagaacttgttagacaatctgttttccaggttcaagcaattttcttgcctcagcctcccagtagctgggataacatgcacccgccaccatgcctgactaatttttgttttttgttctttgagatggagtttcgctcttgttgcctaggctggagtgcaatggcacgatcttggctcactgcacctccgcctcccgggttcagacaattctcctgcctcagcctcccgagtagctgggattacaggtgcctgccaccacgcccagctaactttttgtatttttagtagagatggggttttgctatgttggccaagctggtctcgaactcctgacctcaggtgatccacctgcctcggcctcccaaagtgctgggattacaggtgtgagccaccatgcccggcctgtatttttttttagtagagacaagatttcaccatgttggccaggctggtctcaaactcctgacctcaagtgatccacccaccccgtcctctcaaagtgctgggattataggtgtgagcccccatacccggcctcactagacaatctttaagattccttccagttactaattttgtgtggttttgtcacctactactagtcatgagatcttggatacatcatttttttctttcaatgtttattgaatcacttacgtgaaacctcagagttgacagtcctgaaagggggacttgtgaaaagttaactttatataatgtcatgaatactggctgtcatttaatttccttgaaccctgctcatctgcaaagtggggatagtgctttatctgtatgatgtaaaatgatttagcaaagtcaaaaagtgttgtacaaacacaaggtaatgctatattaaagttataccatataataaggatgtgctttttcatttttgtaagaaaaaaccatgatttaaattataattcttgctgctctagagccagtaattgacccagcaacacttcgtaggagtgcatttgctggagcatatgttttacttttgaaattgcatatttctaaatttgatatcttatgcaattaaatacctctttttactctcacatttaaagagaaagcacttttcctctacaggattggtctctgtgactgttaacagttgtaactgtagtaggtcagtgatacatggtgcaaaacagcctgggataatattgccagctgccagaccagactagggtggctcaagggtaagattaccttctttaatacccgctgagacaagtttaacattgcaaccaggtagggaaataaacaggaaactcttaagaatgaaaggaaccttagaggccatttaatccaactcctgttaggtatacacttggccctccatatccgcaggggattggttccaagacccccatggatatcaaaatccaaggtgctcaagtcccttatattaaatggtgtagtatggtactgtgtatctgttctgcagtatcccagctaagtagttaccagcttcagtttaacttcttccaaggatggggaactcattaaataccaaggtagccagtttcatttttgccagtcctaattgttagacaattattttgaattttgagacttgattacctgttcaaaggtgtttacctattattactcaatgatcattgtcacccacctcccctgatcctatcatttggtgcctgttttaccatattaaatctacaaagacagctatagagtctttgtcatgtgccttcctttagtcataaataattccatttatttgggagaagttattcttaattagtccatgaaagtcctagtgataacgacggttttcttgtctaaatgtctgacagtctgacagttaactgtagaattttgtcagggatcaattcctaatttactggcttatggtgttcaggcttcactccttttttctttttgaaagttacagcatttgcccatctccatctccagttttctgcctcatctcgtgttctccagcatttctaaaagatgatggacaatgattctgttaggatttggtagttgcctaagcattagaaattgtgacttatctgtgtttggagatgtgatttctccttttttatttttatattttttgagacagagtcttgctctgttgcccaggctggagtgcaatggcacaatctcggctcactgcagcctcggcctcctgggttcaaaggattctcctgcctcagcctcccgagtggctggcattacaggtgcccactaccacacctggctaatttttgtatttttagtagagatagggtttcaccatattggccaggctggtcttgaactcctgacctcaagtgatccaccggcctcagcctcccaaattgttgagattacaggcatgagccaccacacctggctagagaggtggtttcatacttggctcattcacctatcttcaactccttttttctgtgtttggtccacctttacagtttaaagagccatgtttatttcaaagaccaggtaaataagagaggagtagtcctgccatctgttaacatgagattaactgattacattttgctataggtcatgtgtcctattaaattatgagtttttccaaataggaactatattttgtctttcccagaatttgacctggtaagaactcagtaaaagttgactgaattttctaaactttaagcctaatctttcttgacttttttcttactttaagaaacactttaggccaggcgtggtggctcacgcctgtaatcccagcactttgagaggctgaggcaggtggatcacctgaggttgggtgttcaagaccagcctgaccaacatggtgaaaccccatctctactaaaaatacaaaaattagccgggcatggtggcaggcacctgtaatcccagctactcagaaggctgaggcatggaaatcgcttgaacccagggggcggaggttgcagtgagccaagatcatgccactgcactccagcctgggggatagagcaaccctgtctcaaaaaaaaaaaacacttaaaaaatggtttttagcatttttcatgagcctcaattcctttagcactttagctttcctatcactatttaagtatgatttttgaatctcatcaatagatttttttttcaactttctgtcttttgtgtgtatcctttaaaactctaatttgatatcatgatagtgtagaattttactagtggaaggagagggttcatctaatttgaatccctatttaaaaattattgaggccgggtgtggtggctcacgcctgtagtcccagcactttaggaggccaaggtgggtggatcacctgaggtcaggagttggagaccagcctggccaacatggcgaaaccccgtctctattaaaaatacaaaagactgggtgcagtggctcatgcctctaatcccagcactttgggaggccgaggtgggcggatcacaaggtcgggagtttgagaccagcctggccaacatagtgaaaccctgtctctactaaaaatacaaaaattagccaggcatggtggcgtgtgcctgtagtcccagctactcaggaggctgaggcaggagaatcgcttgaatccaggaggcggaggttgtggtgagccaagatcgcgccactgcactccagcctgggcaacagagtgagacgccatcttaaaaaaaaaaaaaaaaaaaaaagccgagtgtgatgtaatcctagctactatggaagccgaggcaggagaatcgcttgaactcaggaggtggaggttccagggagccgagatcataccactgcactccagcctgggcgacagagcaagactccgtctcaaaaaaaaaaaagaaaaattaaaaattaatgaaactgaagtttagagaggctaaatggcttgtgcctaacttagatctgtgattttggcaagatttcaaagaaagtgattcagagtatctgccagaatctcagtttcttattgccaggtctgtgccctttccactaattgtttgaattaatcacaattacctatgaagcctcttctcattctttggacatcttttccctattctgtgttaggcatcatttgtaaaaatctcaggagagtttattctttgggaaccatattgccttttcatgtctgtagtcaggagaccttttgtttccagatgagttccatccagcttcgacagctgcattcgctccaaacatttttaaatgtacttgaagtcaacagcattcattctagcccgctgtttccttttcttgctgttgtaagttttagtatgaaaaggttgtgttttctcatgtttcattttttaatttctttctttttctttaaatagagacaggatctcactgtattgcccaggcttgccttgaactcaagggcttaagtgacccactcgccttggcctcccaaagtgttgggattacaggcttgagccactgtgcctggcctgttctctcatttctaaggatcacatcattaccatattggcagccttttcttcccccacactctagccacattaaaaaaaaaaaaaaaactgggctgggcatggtagctcatgcctgtaatcctagcactctgggaggccaaggtgggaggattgtttgagctcaggagtttgagaccagcctgggcaacgtggtgagacctcatttctaccaaaaaaaaaaaaaaaaaaattggctgggtatggtggtatatgcctgtagtcccagctacttgagagactgaggcaggaggatcacttgagctcaggagttcaaggctgcagtaaggtatgatcacaccactgtacaagaccctgtctcgaaaaaaggaaaccttattttttggtataattagattttcggcagatggtctaaaatgctacaatatttgtactagtttttctcaactgtctgcggttgtgtatactataggtgtctgtacttcaattattgtgaccttttctcctaattcaagtgctcttccctgtactttcacactctggttcataggtatctatatgggtttgatgtgtgtatactctgtctgtaccgttactttcttccctgtctttatttattacctcatacataccctttcattgtatatttcaatctggaattccttaatgatatactaactcttggtctgcaaaggtatctctttttgttagtctggtatttgatctgtgcctagtctgaggaactgtgcttgtctgtttccttataataacatttcaaatgttacccatacacctcactttggtatatagctatccaaatccctaaggactgtacttgatgagtctgcctttttcccctccttttttttttttaacctgagcattactgcacagcctgagtgtctgctttctgtgtcagatagtcatcttccagagcatctggcttggcagcttgtttactttctctctcagaactgagtttaaggttttcttgtttcagagggcaagtccactccactccagcttgggtgtcagagtgagaccctgtctctaaaaaaaaaaaaaaagaaatcaagcgtttcatggaagagtagatgggaagaccatctgccagattcttctacttagtatattttttagaagtctccttgagaatcaatccattcattttctgagaaatcaacaaaagtggaagcccgagttcctaggcctgagtcttcataggctctatcatgtattgaatgcccttaagagataccatacacccttcatatagctatatgatttctgtgaactctctacacatacacctcaaacgggattcttgaactaccaacatgcatcacttccttctgacgcaataatagaactcttttatctgtcaaatcctctgattcctctgtatctttctctggaacgtatttcttatttagcatgttttctagaactggtagtggttagtgacagataggccagatcaggaacacctacagctggaagattagtcggtcatactgacaggtgagtcatcttgctttaggatatctaccgaaaagcagatgacaagaccaagtccagtcagccaggtagagtattttgtctagaatgaataaaaaatagacagtagttcagactactagcgttgaagttggggaggttcaacaaggggcaggtatttggaacagagattgggattctcaaaatgaatgagtatcatcagaggggagttttgattgcaagtactaggctttcagctgtgaggccaacattcagaggctagaatcaaacctctgggggtaggtgagaacaagcaggaacagatattatttgaattgggacctaattatttgaattgggaattgggacttaagggagaagtggaaccaatagcaggactgactttacaccaagttgcccaagctaattggctagaattccttgacccacaagattcaaaataggattggtcccagcctgtggttgagtccactggtgagggtgtagtgattccaacttcaatgattaaaaggcagtagaggcggagtgtccctgatagtgctacacagggatggcttagagttccacttgttcagaacttcttttgctcctctagtcttgtcattttttgttcacttatcttttgacatcactttacttctgccttccctccttgaacacttttttcttttctttttttttttgagacagagtcttgctctgtctcccaggctggagtgtagtggtgcagtctcggctcactgcatgctccgccttccgggttcacgccattctcctgcctcagcctcccaagtagctggtactataggcacccgccaccacacccggctaattttttgtatttttagtagagacgggatttcaccatgttagccaggatgatctcgatctcttgacctcgtgatcttcccgccttggcctcccaaagtgctgggattacaggcatgagtcaccatgcccatccttgaacacttttttccatctgacttctcttctgggctgtttctactgtcgcatcaaaaaaagcttttaggctgggcacagtggctgacacctgtaatcccagcactttgggaggctgaggcaggcggatcacctgaggtcaggagttcaagaccagcctggccaacatggtgaaaccctgtctctactaacaatacaaaaattagctgggcaaggtggtaggcacctgtaatcccagctacttgggaggctgaggccggagaattgcttgaacccaggaggcagaggttgcagtgagccaagatcgcaccattgcactccagcctgggtggcaagagcaaaactccaactcaaaaaaaaaaaacaaaaacaaaaattagccaggcgtggtggcgggtgcctgtaatcccagctacttgggaggctgaggcaggagagttcttgaacccgggaggcagaggttacagtggtagacattttttggtcttgtccctttctcccctagtagcaggaaggcctgtgtatttgtagtagacatatttgatgctagtctctggcagggaaaaaaacatagagcacaaatgtagcaagcaataataaaagtttcttgggtatgtgtgtcacgtttttaaaatctctggatgagccagcaggttttattagtcattcctgttaattctgcacctgagatactcctaggaaggagtactttttttgcctttttggtttttttttttttaaagagacaaggttttgatttgtcacccatgctagagtgcagtggtgtgattctagcctactgcagcctcaaactcctgggctcaagcaatcctcccacctcagttttccaagtagctggaactatagctgcgtgccaccccacctggttaattattacaattttttgtagagacgggtcccactattttgcccagattgctcttgaactcctgggctcaagtgagcatcctgcctcagcctcctaaagtgctgggatttcaggcataagccactacatccgcaacttctttgctttttttaggactgttttttaactgactgtttttaactgaccttgttacatttttttcccctagctactcttctttttaaattttagtcagtagcaacctagaggaatctctcctgcgagcactttttcatactaaaaataatggactgtaactaaaggataacagggactatgatcagaaacctctattcatgtattgcttgtttggactaagccttacaggatttgctgggtcttaagaggcccagcacattcttggatattgtttatattgtcctgagtcaggttctttaaattcatatatacagtatgagtttacagggtttttttgtttgttttttctatctctagggttgccatagtttctaaatcttttgaaggaaaaactgatcgcacagaagagtggtatggaacccagtacaaacaagaagctataccggatgaagtcatcaaggtagggttaactcatctatgaataagcctgacatgtgaggaatcacaagaacattgctccctagatccaccaactaaggccccagagtgtggaagactgatgacctagtgttatctgtaccatcctaagagaaatcaacaagtagatagggagctggagtttagccttttcatgaagacatggtactctagccaccttctcatgtgtctatcaaaccaccagggttgtgcctcatgccataaaatgtaactaaagtgcagagtacatgggcacaggcaccagaaaggcaagaagcgatggaagtaggaagcatgagaaaccaatgcaagggctccaaagagctcacagtcttgctgtgaacacaggctgagagcaggctctaggattcataccatcttcacttcaggaggtgctatgttttatgcctcatgttatagcaccgttctttttgtcaacataggagaattatgattttcagaaaaggtatgttaaaacaatattttgtcccattcatcagtagtcaggattttgcttgtgaatgttacctacttatctagtactttttctttctttctcttttggttctcattggctatgtgcctttgagactgcgtcccttattcctgggaaaagaccagaaaactttactcaggctagattctagttaaactcaagtaatggacattttaaaaatgtacctgtgtaatgacatacaaaaaaaggaattagtttaagaaagaagatcatcactggtacttcacagatctctgacatattcatgatacagaagatcattgaagccctccagtgtgtgaaaatgtccatctctctaaactgagaggaaagctgatcttccatgaattagtgctgggtctgaaatagtcctaaaagaagaaagaatccccctgttcactggactctgaccataaccaacctgccctgaatgggaattttatttttttttttgagatggaatctcgctgtgtcaccatgctggagtacagtggcataatcttggctcactgcaacctccacctagctcagcctcccgagtagctgggactataggcgcatgccaccacgcccagctaatttttgtatttttagtagagacagggtttcaccatgttggccaggatggtcttgatctcttgaccttgtgatccgcctgcctcagcctcccaaagtgctgggattacagctgtgagccaccacacccggctgggaattttttaagaacacatctatctgggaactcagtagtgaaattacttactaagtgtttcctagtccctagtattcagctgttctggaaacctaagataccacttaagaaatatggccaacgtccccagtgccgaaagtcacaaatgcaggaactaagaaccgtaaaatctgcaaggctgtgccacaccagctagagatcaaattactgaatccagaaatccagaattattgacaattggtttttttttttaaatagacagggccttgctctgttgtccaggctggttgctttttactcctggccagttgctttttttttttttttttttttttaaataatgaaaagccttataaattaggttcaacaatcagtggcctgtgatctgtcccacttagcttttggaactagaacaggaaacagatccagtctactacaggttgtgtgaatcccaacctaaatctcaactttgttttttctttttttttttttagacagagtctcgtactgttgcctgggctggagtgcaatggcgccatcttggctcactgcaacctctgccttccaggttcacatgattctcctgcctcagcctcccaagtagctgagattacaggtgcacaccaccatacccggctaattttttgtatttttaatagatatgaggtttcacaatgttggccagactggtctcgaactcctgacctcgtgatctgcacatcttggcctcccaaagtgctgggattacaggcgtgagccaccgcgcctggcctcaactttgttcttaaccttgtgcttgaactactggttcacttaaaagttcacatgatcatctgggagaggtgtgggccagttcttaagaagtactgaaagccgagcgtggtggctgatgtctgtaatcctagcactttaggaggctgaggtgggcagattgaggggagtttgacaccagcgtgggcaatacagtgaaaccccatctctaataaaatacagaaattagctgagtgtggtggtacacgcctgtaatcccagctactcaggaggctgaggcacaagaatcgtttgaacctgggaggtagaggatgcagtgagtggagatcacgctgctgcattccagcctgggcaacagagtgagattctgtctgaaaaagaaaaaaagaagtactgaagtgaggccgggcatggtggctcacacctgtaatcccagcactttgggaggctgaagtgggtggatcagttgaggccaggagttcaagaccagcctgggcaacagtgaaacccaatctctactaaaaatacgaaaattagtcgggtgtggtggcacacacctgtagtcccagctacttgggaggctgaggcacaagaatcacttgaacgcaggaggtggaggttgcagtgagttgagatcatgccactgcactccagcctgggcggcagagcaagactgtctcaggaagaaaaaaaagagagaagtactaaagtgaaagacacctcctttagcctggctttcaggccattcatggatataacttagtatagctgaaagtatggctcttatataaatgacctattgtctagcagttgtgggaatatattcctgagcagattattctccattctttaaagagctagaataaacatgatctgcatatggaccagtcagcttttctgtgttccatagtctcaattgttcctcagctggtcattttggagatgtggagaggaagagtagatatatgagtgcaaaatctttgctagtactagaaagactaactcaggtttcaggaaaacccatcgatagatttggtagtacctcttttatatatgatggaaaacaatgctgtgtgacatttgtgcacttaatatttgcccatatattgagcagagatactattttaaactcttaaatcagactcttactgcatttgtgtgtttcattattcatccagaaatggcaaaatgctgacctgaatgggaaatttaaacttcctacaaagaatgaatttattcctacgaattttgagattttaccgttagaaaaagaggcgacaccataccctgctcttattaaggtaatgtgtttgaatcagtgattttaaatttgggggacagacctaatacatgggggactgggtaaatgatttcttacatttggtactatgttgatttggggaggctcacatcctaataggtgacaaaaaagctgcagaaagaataactacaaaaaatattagaaggttaaaaatattaaagcaagcaaacaaaactaaacagtgtagaatctagggaatcactttctttgtaggagaaaaaagtaagtctgagctgtaaccacaagtctgtggaaaggtctgttcctcttttccatgtctgctgaagacccaataaggaagtaggtttatgctgcatcatggacattaaagataagaaaggatctctaaagcctgaaagagagcaagtccagggggagctgttggatttcctgcccttaaaaacattcattatgacatagtgactatctcaaattaatggaatgataaactagtgcaaagggctgttgagaagtagggttccctccccatctttttcagaatgtccttttcatgctattatttcagaacttgagtaaagtatgtaaaaaattgtatcaaattattacagcacattctcccttctaaacgtatttcttctcccttctaaacgtatttcttctcccttctaaactgtttctaaactcatgactgtaggcacacacacacagatgtttctttttatcttcttcagatgacctaacatttggaagaatttagatgagttcaatgagataacaattagtgtttaggaacactaaaatttgtcttaagcaactagattattaatgagacaaccatttttctttattttcttttctttttttgagacagagtcttgttcttgttgcccaggctggagtataatggcatgatctcggctcactgtaacttccgcctcccaagttcaagtgattctcctgccttagcctcccaagtagctgggattacaggcacccgccaccacatccagctgattttttgtatttttagtagagacagggtttcaccatgttagccaggctggcctcgaactcttgacctcaggggagccacctgcctcggcctcccaaagtgctgggattagaggcatgagccaccacgccggacccgtttttctttaaaaatgacattttaaagagttttatattagcttatgcaaagagaaagttcatttacctcagctgttttttatgtattgtttatcttatcttatcttatttatttatttatttatggagacagggtctctctgttgcccaggctggagtgcagtggtgggatcatagctcactgcagcctcaaactcctgggttcaaaccatcttctggcctcagcctcctaagtagctggattacagacgcacaccacacccagctagtttgtttttaattttttgtagagatgggatcttgctatgttgcctgggctggtctagaactcctggcctcaagtgatcctcccccttcagcctctcaagtagctggaattataggtgtgagctaccatatccgacttttgctgtttgttttaaataggccttcccagagcaaactaacgagaacattaaaccatttatatctcttcccagagtttcaaggtagtttcaagtgactaaagccattcttagcatagcatgagtgaagtggagaggcaagataagtagcttatttgttcatccttggccatgttggttatccatggttgcatattaaattattccaaaatttagcagcttaaaaccacaacatttaagttaggccagatgcagtggctcacgcctgtaatcccagcactttgggaggctgaggcgagtggatcatgaggtcaggagttcgagaccagcctgaccaaaatggtgaagccccgtctctactaaaaaaaattagctgggcgtggtggcgcgtgccttatcccagctactcaggaggctgaggcaggagaatcgcttgaacccaggaggtggagattgtggtgagccgagatcacgccattgcactccagcctgggtaacaagagcgaaactctgtcacaaaaaaaaaaaaaaaaaaagaaagaaagaaagaaagaaaaagaaacaacccacaacaattattatctcacacagttttttttcctttttttaaaagactcgcattccattgcccaggctggggtgaagtggtgcagtcatggctcactgtagccttggcctcctgggctaaagtgatccacccacctcagcctcttgtgtacgtaggactacaagcacccaccaccacgcccagctaattgttcaatatttttgtagaggtgggatctcactatgttgcccaggccgatctcaaactcctaggctcaagcgatcctgcctcagccttccaaatttctgggattataggcatgaaccatcatgcctggtttctcacacacagtttctttttttctttctttctttttttttttgagacagagtctctctccgttgcctaggctggaatgcagtggtgcaatctcagctcactgcaacctctgcctcccaggttcaagctattctcatgcctcagcctcctaagtaactgggattataggcatgtgccaccatgcccaactaatttttgtatttttaatagagacagggttttgctgttttggccaggctgatctcgaactcctggcctcaagtcatctgcctgccttggcctcccaaagtgctgggattacaggtgtgagctgctgcaccgtatctcacacacagtttctttgttttgttttgttttttgagatggagtcttgctctgttgcccaggctggagtgcagtggcatgatctcggctcactgcaacctctgcctcccgagtcctggttcaaactattctcctgcctcagtctcctgagtagctgggactacaggcacgagccaccacaccctgctcatttttgtatgattagtagagacggggtttcaccatgttggccaggatggtctcgaactcccggcctcatgatccacccacctcggcatcccaaagtgctgggattataggagtgaagccaccgcgcctggccctcacacagtttctgaggagggtcaggaatccagcagtgacttagttgggtagttctggctcagggcttgtcgtgaggttatagtcaagctgttggccaaggtttcagtcatctgaaggttcagccagggctggagaattctcttccaagttcagttatgtggttgttggccagccttaatttttcaccacatggacctctctgtagagttgcttgacatggcagcaggcttcccccaaagtgagtgatccaggagggaaagtgagtgatcaggatgcaagccgcggtgtcttttataatgcagtctcagaggtataccattaattctgtcatattttgttagtaaggcagaccaaccctggtgtagtgtgggaggggaccacccaaggctgtgaatctcagcaggcaaggattgttgtgggccaccctggaagctggctgccatacgcttgcaagggacttctgcctctgccttcctcctagtgtccagaaagacgaagacaggacagttggtattggcttctctgatctgtctcttccttcactgtacccccatctccctaatacaggggaaatagaaggcagatttcactctgctacaggagtctgcagtctttgtctccagcttcctacctgctgactcttgagtatgcttcaaggcccatgggacagcaactccagaacaaaactctaactattgcttctgtcctcctcctcttgaagagtgatttgattgaacatttttgctgaatgcgcctctatttccctaaccaaattgtttctccatcacaggatacagctatgagcaaactttggttcaaacaagatgataagttttttttgccgaaggcttgtctcaactttgaatttttcaggtatgtaagatgaatctagcttataaagcttataaaaatcaacaattacgtttccaggagttgtctgttcttcttaaacatccatgtctagaaataaaaggaattagagttatttcacctagaaaaggagaggctgaaaaaaataaataaataaaagtaaagaaaaggagaggttggccgggcacggtggctcacgcctgtaatcccagcactttgggaggctgaggcgggcggatcatgaggtcaggagagtgagaccatcctggctaacacggtgaaaccccgtctctactaaaaatacaaaaaattagccgggcatggtggtgggtgcctgtagtcccagctactcaggaggctgaggcaggaggatgcagtcagctgagatcgcaccgctgcactccagcctgggcgacagagccagactctgtctcaaaaaaaaaagaaaagaaaaaaaaggagagctgttgctgttaagaggtattttaaaaaccagtgttgttaattctttttttttttctttccccattaatgagtatgccctttagctgaaatgatttatgttagctattgttaggatgaccttcttagccttcagggttttggattctgaggaggccgtagatttacccagaagaagactcattgaagaaagaataaataatttggggtgtttttattgctttggctttgtattcctggaacttgtctagaagaggaggtactagttactaaatgatcctgagtcttgttttgtcctttgtctggaacccttagatactgcttcctctatttctggcttgattacttaaacattactaataaaaagggagaagatgtttagtaaaatttatgaataatgctattgcagtaatttctcagtgcaccttcaattcatctttgtcttcctttacttatttgtgtgttaatcacctgtttcagattttactttgtgagtttatacttcataattttatatttctaaaattcagtggtttgtaagataagcctatcatggtttatttgttcagtaatgttcaatatgataatcagctttttcattaatttttattcagttggcttgacatgaaattagaggtagataaggtttaaatgctttggaaagagggaaaggaatttgattttccatcaacaaatatgttgagattatagtgattataaatattgtggttttattgcatgagattcacagattatctagaactgtgcagagattttttattgtttacaccaaagatgggctgtcaggttgtggcttattattggtaaagggcattacaaagctgctttttattttttgatatttgagagtgatatttttaacactctaagcagcttgtcaccacttttccatttggcctctatgatgatgaatttctttagactaccctttgagagaccattttacatttttgtgttctctaaactgcctagcgcatttcctagaactgaaaatgtctgcctcccacacaaatccctccctctggtctgtcttcctagaggtaaccactgttctgtttcttgtacattttaattgaaattttcatgtgtgtgtctatatcctttccatcttttcagaaataagattatattatgtgtagttagctatggtttttaaaaccctgtgatccatatttaagcatatagtatctggttacaaaataacgtatttttaaaattaacacatgaaccagaatttaggtatcccagttgaatcctattctcttttaaaagttagtttagggtcttctccacttcaccagcacagctgctgtggatacagctgtttttgttgttctctttttttaggagacagagtcttcctctgtcacccaaggctggagtgcagttactgcagcctcaaattcttgggctcaagtgatcctcccacctcagcctcctgagtagctgggactacaggcgtatgccaccttgccaggctggatgtagcattttaggacactccttggaattattttctgagcctgagccatagtgctttgagacccaaaacttggattttctggcttttcacttccacctgagaaaggtgcatagttgcctgtggggccgacctctgtgatatcctctcttttgttttgatgattttgtttttgtgaattgtgccttaagtttttgagctgctatttgccaaaagaaggaaatctgtcatcatgtatcataccttaaaaaatttaatggcagaacatttattcagattttccagttggagaatatttggatagctgtagaactttgtctttgattttaattctctaagtgactacacattttatccctatttttgcttttttatcagctttgataaaattgttggcttttggctgggtgcgatagctcacacctgtaatcctaacattttgggaagccgaggcaggaagatcgcttgagcctaggagttcgagaccagcctggacaacacagtgagaccttgactcaactttaaaaaacaaaatgttgactttgttatcagtacattagttatatttactgtgctacaagtagagtgaaacttttaatttgctgccaaacaagccaagcaggcacctgcctcaggcctttagcagtagctatttcttcagcctgggaagttctccactccaccccttagatatccccagggctcactcccttgcctccttcaggtctgagtccagatgtcacattgtaagagtggccttgactggccatcttatgtaaagcagcagtctttcttccctgctgccatcaccccatcattccctattccccttaccctgcttaattttaccccatagcactgtcaccaactaatatgtcaaatttaaatttattattatgtgtcccctctagctagattatcaactctgaggtcagggaatttgcctgatttgttcactctttatttccagtgcctagagaagagcctggcactgtagtaagcatataatacatatttgttgaatgagtgagacctttactttcttctgataaaaggtaagcaaggttgtatagtcaaaggagcaggtcatttaacttgcatttgaatcccagctctgctgccacgaactcaggggacctgaagaaaattatgtttcttatctgggaaatgaagtttagttgatcactgtggtggtttagttcttgtactctataattctttcttctttgttctttctcattaaaatatttttctattttatttttccctagttttggctgctgttatatgatagaaattatcaattattttactgacagttctctagctttactgttttggggaaaactcagggataagctaacattttcacaggtctcaatttttctaagttcatgtaattaccacagacacatttcccagtcctttattcctgtccaccaaggatgtgactttattggagagagagggaagacatgcaaatgctgtatctgttctgtcggccgtgctcctcccattagcctaagcacagccatgcattttggcccgttcccactgctcacataccctgcatttctaacttgtcagttctgccacaccatctggggtaggcagttccttctccttcttcactactaccagtgcgcacgcacacacgcacgcatgcacacacacacacacacactcacacacacttcaggcttctttttcagacatcttcttttttttcctcataagaaatagcctcaagaattcaaccatatcctcaggaaatcatattaaccggtgttcaatatcttgatccatctcaaaaggccatatcacattgagaagtaataaaatcagctattttactgtcaacattttcttccagcccatttgcttatgtggaccccttgcactgtaacatggcctatttgtaccttgagctcctcaaagactcactcaacgagtatgcatatgcagcagagctagcaggcttgagctatgatctccaaaataccatctatgggatgtatgtaagtacccacgccttagagccttccactcatcaacattttttatattgatttgatggaagcattttttgattgagggtgtgagtttaatttcttttttttttaatctttatggctaatcatattttctcatttaatttttaagttagcttttattctaagtgttcaactacataccattcatattatgcaaattttccttgatttctttttttttaaacgtctttcatcagaatgtcatatttttctactcaaacaaaattggaccctgatttaggtttagctcttacccattctgtatttgaaatcttggtctttggcaaaggaaaatgaagtcttccttttgtaaaacctaaggttggcatatactatttccctagaaatccagatcatgaggctgcatatccatactcttcggtcatgtttcttcattaccatgccactgcttgaggtatcaaagcatttcttttgtttttctttttgttagtcgctacatttatgctgatcctctccattgcaacatgacatacctgtttatcaggttattgaaggatgatttaaaagagtatacatatgcagcacgcctctcaggtttgagctatggcattgcatcaggaatgaatgcaatacttgtaagtaaaatgaaaaccaaagaaaaggcaccaccccgtttaagcattatgttgagcttgggaaaactattaacttcgcatttttaaacaagaaagttaatggtttttttccttgcatctttttgatgatcaaagaactcaaattagtgttagttccactaatgaatgatttaataaagtttagtgcatcttgtgaacatgtatgtgtgctacgtttatttgcatgctcttctgcctgagatgtttaacatattaatcctgaaagcatattgttctttctatataattgagtatattaacatccgtaagtagaagatatccatagttgttgtggtgattgaattttacttataaataggcaccctttatttctgcagacagtagtataaagtttctatgttcagatacatctgacattttaatttaaaacttattttgtagcatgcaccattacctactttatgtgtgttttaaaataagcatttattaaatccatctaagaaataactagatcctttctttggaatgtgtttccaagcttgcttatatctcaattccgagttaacatcccttttatggcacacattcatcttcacttttcttgaaaatatattgcatattttagtaaaaatgaaaacaagagcattttggggtactcgttgtttaaattcttacacaaaagattgtaggaattttaaattttatttattttccagtgacttttttttcttcacataaataaattctctggtagcttttgtttaatgtataagaatgtttattaatctaaccattcccagagtccacagaagtttgaagctcagagatcaaaattagctccaaatagaaaagtaatcatctgttttctcttttttctgttgatttttagtagcatattaccatcaaaacacataatttttatttatgacaaaatgggttttctgctaattgtcagtctagttcctacagtaggaaaaatgatgtgcttgccgtggccagtggccttccctcctgctgaggttcttgcctatcatcctgtacagcgtagagactttcatgatattctagctgcagtgatatcccctactgctttgcgtgccaccatgtggaaatatcatgatagaaattctccattccccacttttcaaaatgttaggcatttagagacaaagtaaattttgctaagttggctgggcacggtggctcacgcctgtaatcccagcactttgggaggccaaggcaggcagattgctttgagctcaggagttcgagaccagcctcctgggcaacatggcaagaccctgtctctacaaaaaatacaaaaaattagccagacatggtggtgtgtacctgtagtccagctactccagaggctgaggtgggaggatcgcttgagcctgcggagcagaagttgcagtcagccgagattgtaccactgcactccagcctgggtggcagagccagaccctgtctcagaaaaaaaaaaatgtgctaagccaaggtcctgatgatacatacagtgtatcctttttacacatttgttttgccattagcttttggaacaccaacagaacttaccaaataagcaagtggttagaattgtggatcctgcctggcacggtggctcatgcctgtaatcccagcactttgggaggccgaggcaggtggatcacctgaggtcaggagtctaactatgttgcccaggttggtcttaaactcttgggctaaagcaagccttccatctcagctttccaagtagctgggacgacttgtacgtgccactatgccctgtgatttttatcttcttacctcacctgtagaaaccttaagtctgcctttcattagatattctttttgaagaaaaaacttagccacattctacaattaattttataaaaagaatttgagttttgatgatatagtatatgccaccatagttcggtgtcaggtgagtttacttactgttggttttgtttcagaaaagtaaaattatgcttttgggtatagagattgttaatggccaggcactgtggctcacacatatagttccagctacttgggagactgaggcaggaggttcacttgagctcaggagtttgagtctagcctgggtaccctagcaagaccctgtctcgaataaataaatatattttttaaaaaagatggttaaggctgggcatggtggctcacacctgtaatcccagcattttggaaggccgaggcggatggatcacctgaggtcaggagttcaagaccagcctgactaacatggtgaaacgccatctctactaaaaatacaaaatattaaccaggcgtagtggggcacgtctgtaatcccagctactctggaggctgagacaggagaattgcctgaacctgggaggctgaggttgcagtgaactgaaatcgtgccgttgcactccagcctgggcaacaagagcgaaactctgtctcaaaaaaaaaaaaaaagatggttaatgttatcttcctaagtgttacactatatatatttatgacacattaaattgaatttgtttcattttttacatgtctgttttgggattttctacatgtttaaaaatcaagtcgtttatttggaagttgttttgtgatatttttagacttttaataccctgaattctttctgtagctttcagtgaaaggttacaatgacaagcagccaattttactaaagaagattattgagaaaatggctacctttgagattgatgaaaaaagatttgaaattatcaaagaagcagtaagttttctgaaccctgcttttttattcataagataatattgctatattataaaaagttttcataatagtttttataatataaaagaagcaaggaggaaaagaagaattcataaccctgtggcattcatctcaccttgtcattgcaaaatcctatactccatccagaaagaaatcctagtagactctggtggacacctggcctcttctctgtgggtgccaagagctcactgcaattcagagttgcagctctgaatttcaaagagaagcacttagtggctgtcagggcctccttgaatgttccatcccaacctctagttcagaagaacacgcaattcagcagactgaggtctgctttacctcaagaccttgtcacattagagcacactatttgggtttgacatatcttccacttacattcaattcatgtttggcccagtaatggaagtatgggatgaacagctgcttctgaagctaaactatgacctttccttgtatactagaagaaactaccatcagttttcaaataaagattccatattttatatggctacctatttatgttgcttgcttatggagactttggggatggctttatagcgtagaacctaaagattccaaaagacttccctgaaaactagggataactttctgagggactaaagatatcccatagtgaaggcacttatagtccatgtcagatgctgaacaaatgtagcttggacaaagaaaaagcatgcacttttatgtaaagatcggagaggaataaaccccattcttaattatataacttcagaaaggggaaagaagggaatatcctagtaatacagtttatagagaattgaaatttgattataactggacttttgaaatgatttttaaaagatttataaaattaatgaacgcatgtctctttcactagtatatgcgatctcttaacaatttccgggctgaacagcctcaccagcatgccatgtactacctccgcttgctgatgactgaagtggcctggactaaagatgagttaaaagaagctctggatggtgagactttctacttaaagcttaatgctttcttcatttttttcctaaattcattttggtttattctgatattgactgtttatacttttaaataacttgtagttctattaaagctggctgtgtatatgttttataaaaacagtggtgggcaggatggctatagttaacagtaacatatacttttaaataggtagaaggaagatattgaacattcccaacccaaacaaatgataaataaacttgagatgatggatatgcttagtaccctgatgtgatcactatacattatatgtatatataataacattatatactctatgaatatctacaattattatttgtcaattaaaaataaaatgtaaaaaaacagtggtggctttgaagtggtttttgcattcaggcaggttagccacatttactgttttcaatctggacctacaccagttaattattactacttttagatttctgcagaagggctgggttgcacatacctgtaatcctagtacttttgggaggcggagaaaggaggatcgcttgatcccaggagtttgagaccaccctgggcaatatagtgagactctgtctctacaaaaaataataaaactattagctggatatggtggcttacacctgtggtcccacttactcaagaggctgtggttgagaggattgcttgagcccgggaagttgaggctgcagtgagccatgattacgccactgtgctccagcttggatgacagagcaagactctgtctctgcctccaaaaaaaaatttttttttctgcagactaaatgctctgacccaagtactaaccttgttaatattgaaggatttttatttggtgtttttttttttaaagacggagtctgctctgttgcccaggctggagtgcagtggtgcaatctcagctcattgcaacctccacctcccaggttcaagcagttttcctgcctcagcctcccgagtagctgggattacaggtgtataccaccacacctggcaaactttttgtatttttagtagggacagggtttcaccatgttggccaggctggtcttgaactcctgacctccggtgatccgcctgccttggcctcccagcatgctgggattacaggcatgagccaccgcgaccggccaatattgaagttttaagaaaaagttagctgaacttcaaagtcttaacacacaatgttcaggtttttttttttttcctgctttagcatccttagatcagttcagttaaaaattggaaaatgtgaaagcctaaagagtcatcttttgttgtttttttccctagaatcttaagtctaattttcaggagtttggcttgaaaatccaaaattccttaagagcagtgattatacctgccttccatacccctttacttagtatctagtataatattatgccctcagtgtgtatctaatgaatgcctattgaatgtaaagaaattactttcaggatttctttactggaaaaaaatgtagattggtatcaccctttattattgttttagattttttacttctcaacattacctcgccaattaatctttcttcctatgtgctcagccataagcattaaaatgcaataaaaagaattttgggccgggtgccgtggctcacacctgtaatcccagcactttaggaggccgaggcaggcggatcacgaggtcaggagatggagaccatggtgaatccccgtctgtactaaaaatacaaaaaattagccgggcgtggtggcgggtgcctgtagtcccagctactcgggaggctgaggcaggagaatgtcgtgaacctgggaggcggagcttacagtgagccgagataatgccactgcactccagcctgggcgacagagtgagactcttgtctaaaaaaaaaaaaaaaaaaattctgggctgggcatggtggctcacgcctgtaatctcagcaactttgggaggccgaggcgggcggatcacaaggtcaagagatcgagaccattctggccaacatggtgaaacccacgtctacaaaaaatacaaaaattagctgggcatggtggcgttcacctgtagtcccagctacttggtaggctgaggcaggagaatcgcttgaacccaggaggcagaggttgcagtgagccgagatcgtgccactgcactccagcctggcaacagagattccatctcaaaaaaaaaaaaaaaaaaagaattctgttgaatgttttaataaccttttgtgacaagttcttatacttacgtaacactatgcttttgatgtcatcagtgacacaaatcgagcaaagtactgaaagtcattattttgttgattgcctcaggcattggataggagactagattataaaaatcacttactagaacaggtacatttttttatcaggacagttaatatgcttttctttgcaaaatgattatggtcatatgcaattaatagcaagaattataccttttaaaaataccacacaattaattttaaatgttttccaaaacgaagcctacttttataatgatcaaaaagcaaaggtttgagggttttattcacccttcgttagaatctaggtcagatggcatgttaattttaagcagaataagctctatagtatctcagagggatatgaaggcttcctaaaatggattttgtaaagagaatagtcagttctttttttatttaaattttctgctcaagtaaataattattccattttgatatatatactcctacaataatccaaaatgccagaatggcttaatttggaaacaactcagtgtgagaggctgcctcttcagtgactctaaatcattcagctatccaggtgccagggtagcaagaacttcagggttcagtgtggtccagcagcatttactgactgcctgccatgcacccagcccaagactgcaggtgcttgagattaaaaaatgatcaattaaacatggcaaaaccccatctctacaaaaaatacaaaaattagccaggcgtggtggtgcatgcctgcattcctagctactcaagaggctaaggcaggagaatcgcttgaacccaggaggcggaggttgcaccactgcacttcagcctgggtgacagagcaagactctgtctcaaaaataaataaataaaaatttaaaatgatcaattagatggggtttctttgatcaaggagctccagtctggtggtgaagcataaatgtaagtagatcattttaatagagagagacaagggggtaagtattgtggtggaaagctgcagagagtgccgagggagcctagtgaagaggacccctaaggcagtacagtggaatagaatgaacatccactttggaattgaccaaggatcaaatcccagctctgcaatttactagcttaatgactttgaacaacaaacttaaattttcttaacttcattttcctatctttaaagtggggataatagtagctactttatagtgtgaaagataacatctgtaaaattcctgatctgtggtaagcacttgttatttgcattcccatgtttctccttaaatgtctatcactgattttagcatccattggtagatcttgcatgtagcagttattactatggtgtcctaatggagaagggacagctcttccttacagaaggattaaattaatatatgtaaaaagaaagagggaaatagaaaaattgccattagaactccatagtaataattgctacaggcaataactaccaatggatgctaaaattagtgggtcaaatttaaagaaaaagaaaatatttgtataatctcatttacttttcccaaaataaatatttagtaattacaaagggaaaaataggtgtagatgggcaagtgggcttttccaaattgcatatagagcacatatgagttattaaattataaataaaagaataaaataatacatttacagtgaggacatctggcagacaccaccttaaccaagtgatcagttttaacatcactagtactacaacatatcaacttcatgagtcccctgatagaatgcagtgagaaaggcgcattacctttgtggtattctttgtggtaatacagacatgaaatctaattgtgagaaaacaccagacaaacccaaatgtgggacttctataaaataactgaacagtactcttcaaaagtcttaagatcatgaaatatatggaaggactgagaaactgtcagagattagagggaactaaagacatatgacagctaaatgtaatggagggttgtggatcaaatcctggaataaaaaaaaagataaaaatgggaaaaatccaaataaagtctgtactttagttaatagtattataccaatgttaatttcttagttttgatggttatgaaagatgttaacattagggaaaactaggtgaagtgtttacaggagctctgtgtactatttttgcaagtcttctgtaagtctcaaattatctcaaacaaaaaatccctcataggtagcgctcactatgtcttcttacacctttgcagatgtaacccttcctcgccttaaggccttcatacctcagctcctgtcacggctgcacattgaagcccttctccatggaaacataacaaagcaggtgggtggttgaggttttagcaatcttttgtggatcattgcaagatattttttccctctagtctttctcaagattgttaaccagcatggtgtgataaggaacacattagagtttactcaaccctcttgctctgtggaggaaggtagagggcacagggaaagtagaatgatggtgattaactgaggacctaactttcatggctgcctcctctgctgttttctaccttgtgcaatcataggaggaaatgggagtaattatccctactctgtatagggtggcataattgtatagtagataagagcacgtgctgtagaattagacagcctggattcaaatcctggctctgctatatactagatctgtaatcttttgaaaatgtcttaactctgtgcttatctgttttcttttctgtaaaattagagttacagtagcacctacgtcatgtgtggtaaggattaaatagtacatgctaagtacttagcacatggaaagcactacaaaatttccgtggcagtctgtctcaagatccctcagtctcggccgggtgcagtggctcacgcctatcatctcagtactttggaggctgaggcaggaggattacttgaacccaagagttcgagagcagcctgggcaacataactctacaaaaaattgaaaaacagccaggtgtggtagtgcatgcctgtagtcctagctactcaggaggctgaggcaagaggatctcttgagcctaggaggttgaggctgcagtgagttatgattgtgccactgcactccagcctgggtaacagaacgaaaccctgtctcaaaaaaaaaaaagaaaagatcccttggtctctaccactctgctataccccctccagaacaatatgcccaaggtcagatgctaataagtggcagaagcaagattcttaccaaggtcattttacctacaataaagcctatgtttgcctcccttgcttttctgtgaccccaggtgtctgtagtcaggatcatttcacttgagaccatctttggcagtgccttttttccagcatcagcatcagtgttgatgattgtttgggtgtctgtttctttcaccactaccatattgactctattgcaaaatgaccatactgacaaattcaatttttatccatttgaataggatcaaatatatttaaggttttagaatccacttttatgataaacaaagccagtttatttcacaaacaagatatgtttatgtttttgtaatatgctgggacatatctttttccataggctgcattaggaattatgcagatggttgaagacaccctcattgaacatgctcataccaaacctctccttccaagtcagctggttcggtatagagaagttcagctccctgacagtaagtagagatgttgtaactttgggaatggactattttgacataacagtgtgggtgattacaggtgggctgaatttggtatagttttacgccaaagatttacttgggaacctctcctatttacagaattatgattagagataggtaattctgccaaaaaaatttttggtaggagggccaaataagtaaaattggagataggcaataattttgaagagaatgatactggaattgacgggtacttgaatgaaggggaattaggaagtaaaaatatcacaaaggtattgactatgagtcatgaaataaaatacatttataaaaatggaaactggaattataatatttaattggaaacccataggattctttggcagaaatagttttaggaaacccacaggtgcagataacatgtaatcattacaagtatatttttataagggattaacaaagacttttattgaatttatatattggggtttacaatgttgggttacttttacattaacagtggcttcttctgataaaaactcattaagcattattgtcaatattgctcaaaactgtgtaatagaaggtatattaaatgaaggaagagaagctttttttggccaagcttgattgtttggttgttccctatgcatgaaccatctgtgctgccttttccccccagctattttatcctcccaaaatggtgttctcctttcccccttcttcttcatgggccagtgcctacatcctacttctccttccaggcctattttataagctacttattccactaaactttttctaaaactcccagctagaaataatcacatctacctctggacttgcagcacaatttttctgaacctccctattcaagctacttagcacttctcttgtgttgggattgaagtgcatctccatcttcttgttagactgtacattccttaaagccaaagtctgtgtctagttcatttgagtagcttctaaagcaactggaacatattattacttcaggatacctttgttgaatgcttagagatacgttgagcccagctctgctgttgtgcatgaccagtcatcacagatctggtagtggtttatttccaacttttgccagtttattcctcagtcactaaaaccaggacaagactcaggatgtgctgatcccactacaattagagaaagactcaggatattctatgcaagagccataacagttgacttcaaagtgaggccagtgtagaaacaatatttcaaagtgcaattcatccttcttacttcttttgactctacttccctctttctgtctcctttcctaggatcttaatctcttttgcctcctaagtaccctcccaaatttctccatgttcaaaaatagcccagttcacatctcattctcaaaatgctaagtggtaggaaatcatgctgaattagccagctgatcagatgtgaatctttaaatagttcttcacttaactctccatggaaaggcacttagtatttaaaagtaaaatattcaggcctgggtggtggctcattcctataatcccagcactttgggaggccaaggtaaaaagattgcttgaagccaggaatttgagattaggctgggtaaaatagaacttgtttctacaaaaaatttaaaataaaaaaaattagctgggcatagtggcgcacacctgtagctacttaggaggctgaggtgggatgatcgcttgagcccaggaggttgaggctgcaatgagccatgattgtgccactgcactccagtctgggtgccagagtgacagactgtctcaagtgaaaaggaaaattttcaagcattataaaggagatgttttatttatctttatttttgttattattttttgagacggagtcttactctgtcacccaggctggagtatagtggcacaatatcagctcactgcaaccgagaagatgttttagaatatatatgaaaagggccaggcagccgggtgcagtggctcacacctgtaatcccagcactttgggaggctgaggtgggtggatcacctgaggtcaggagtttgagaccagcctggccaacatggtgaaaccccgtctctactaaaaatacaaaaattagctgggcatagtggcaggcacctgtaatcccggctacttgggaggctgaggtaggagagttgcttgaacccaggagatggaggttgcagtgagccgagattgcaccactgcactccagcctgggtgacagagccagactccgtctcaaaaaaaaaaaaagaaaagggccaggcgtggtggcctacatctgtaatcccagcattttgggaggccaaagcaggcggatcacctgaggtcaggaattcaagaccagcgtggccaacatggcaaaaccccgtatctaccaaaaatagaaaaattagccaggtgtgggggcacatgcctatagtcccagctactcaggaggctgaggcaagagaattgcttgaacccagtaggcggaggttgcagtgagctgagatggcaccacttcactccagcctgggtgacagaacaagactttgtctcaaaaaaaaaagtacaaaaaggctagaaggatgtgaggtgggtgagggagagaggcttacaggccacgttcctctctctctgcttttttttttttttttttttttgagacagggtctcactctgtgtcttggtctggagtgcagtggtatactcacagctcactgcagcctcaaactcctggggtcaagtgatcctcccgcctcagcctcccaagtagctgggactataaatgtgagccatggcactggctcccctccttctgatgagagggaacttagtgctgccaatttataattagtaagtttgactgttggtcaaagttggacatgatcagaaaagtgaaatcaatgaaatacaactccaggcttctctacctcccttttctattaatgtctaaattatcatctgtaagtgtgggcagacatagcattgactttattaaaccccaaataagtttttgaacttgctgctgtctttttgaaacttcctaggaggatggtttgtttatcagcagagaaatgaagttcacaataactgtggcatcgagatatactaccaaacagacatgcaaagcacctcagagaatatgtttctggagctcttctgtcagattatctcggaaccttgcttcaacaccctgcgcaccaaggagcagttgggtgagaggaaagtggggaaatagcagggtactgtagactttgatgaattattttccctgtaaaacattttccacattttcacctaacactgtatatcaggcatggtctacttagagagacttgagaaaaccttattacagagaatccacttctaaaagataagcaatcactatcttatggacattaaagcaattatttatgagatgatactgcatattacatacatgtcaataaagagggcattttaggtgggggaaaaggatactaaggacaagcttatgggtagcaagatgagaaatgagccatccagaggagcttagattcactaaagcctgagttccttgagggcaggtattatctctcattcgtctttatatcccaagcctgggacatacagaaggcacagcaagtgttcccagttttagatactgttaaaagtcttgaggtactggcagatttgatcaatgaggaaagaagctcaaagaagccccagtaatgacagaaaggaaccagtgaaaaaaggatgagtctctccaagtacccatcattgtttaaatacccattgtgctaggtgctggacatggaaaatggatgctctggatggtccttcctttcgaggagctcacagtcaaatcaggatggcaggcctgtaaaggaataattttagtacagcatggtaaatgttattataagagctcaaactattggccgggcacggtggctcacgcctataatcccagcactttgggaggctgcggcgggtggatcacctgaggtcaggagttcaagaccagactggccaacatggtgagaccccatctttactaaaaatacaaagattagctgggcgtggtggtgcatgcctgtaatcccagctactcaggaggctgaggcagagaatcacttgaacccgggaggcagagtttgcagtgagcggagatcgtgccacttgactccagcttgggtgacagagcgagactccatctcaaagaaaatcaaactgtgaatggctatgttgaagatagaaacttcctcagaagtgagacccagaggcaccacagctgttggaggtggtagatcagggcagggcagctgaaggagataagccaagagcttggttttgaaaaggtgttgaaggaaggtagtgcatgtcctcatgagataacatggaagtatgacttttagttagcttgatctctagagagttgcattctgaattaattggttcaggaatggattatctaacaagaaatacagtaggagagccgtgttcatatgcggaacttggatgttaaaggaaacacagctaggactgtcactaagggatgaaaatgagtccagcattttatattctgggagtaactttagcatagattgaagaggattaactcacagagagtgaggagtgacaagatgggagtttgaataatgaataggatttttttcctaagaagaagaaaaagtcatctccaactttgtaattcttcagagagctcttctgctctgtccttaggaactgaaaccatcttaagtgctcatatttctttaagaggtgaatactctaaaaccttaaactagattttatttgctcagacaggttagtttttgaaggattaaaaatgacccaggtctcaaatgccacggtcatgactggctgatgtctgtgtttcaggctatatcgtcttcagcgggccacgtcgagctaatggcatacagggcttgagattcatcatccagtcagaaaagccacctcactacctagaaagcagagtggaagctttcttaattaccatggaaaagtccatagaggacatgacagaagaggccttccaaaaacacattcaggcattagcaattcgtcgactagacaaaccaaagaagctatctgctgagtgtgctaaatactggggagaaatcatctcccagcaatataattttgacagaggtaaggtaaaattagggctccaacatttatggcattcaagtaacatttgattaaggccattctacaaaatggtattcattttgtaggtgatattccgttacctatttggggagttggggtggggggatggctggcacttccaaagaactgttacttaatttaaccccagttttctgttagaaaccttatctcttttttttccctccaaacctagacctggatctacccatatctcacaataaagtattaataattcaatttcacatttttgtttcatcagtgtatcctgagattctgatcacagatacctaagtatctatttcccataatactaaaaaaatgagataataccagattgaacccctttgaggcaaatgctgcccttgaggcacaggagttcaaacatttgcctgtagggatctccaaagatttttcactcctttcagatttgggagagctgtgattcttgaagtctcttgtcttgaatcagcttcctttcaccttgcttctagagcatagattaacaacggattgtgctaagctgtactagaagtcagaggatgtgggttgtgttcttactctgacaccaacaagctaaaaatcttggtcaagacaccttttttggacctcagtttccttacccataatttttatttttgttttgttctttcagagagtatctcactctgtcagccaggcttgagtacagtgtgtcatcatagctcactgtagccttgaattcctaggctcaagcgattctcctgcctcaggctcccaaagtgctgggattacaggcgtgagccaccacgtccagcctacttataatttatctagcagttggattcactattaatgataatactgtctctcatttattgagcatttgccgtgtacctagcagtgttattgtcatgtatctttttcctaattctcactgcagcccttattaagtagttattatccccaatttccagatgaggaaactgaggcttagaaaagttgaggtgactggccaagatccaaaagctcataaccagagagccaggatgtgaatccaggctggcctggctcctgagccaaggctcttacccattgcactacatccacttattattttttttttaagatggagtttcgctcttgttgcccaggctggagtgcaatggcacgatctccggctcaccgcaacctccacctcccgggttcaagcaattctgcctcagcctcccaagtagctgggattacaggcatgtgccaccactttgtatttttagtagagatggggtttctccatgttggtcagggtggtctcgaactcccaaccttaggtgatccccctgcctcggcctcccaaaatgctgggattacaggtgtgagccactgcacctggcctttttttttttttttttttttatgagacagttttgctctgtcgcccaggctgtagtatagtgatgtgatcttggctcactgcaacctctgcttcccaggttcaggtgattctcatgtctcagcctctcccgagtagctaggtctacaggcatactccactatgcctggctaatttttatatttttagtagagatggggtttcaccatgttggccaggctggtctcaaacttctggcctcgagtgatccacctaccttggcctcccaaagtgctgggattataggcatgagccactgtgcccagccaacatccacttacttttatttgaaatcaaagcaaatggtcacgtaaaaatgtggatgcttggctaggcacagtggctcacgcctgtaatcccaacattttgggagtgcgaggcgggcggatcacgagttaggagatcgagaccatcctggctaacacggtgaaaccccgtatctactaagaatataaaaaagaaaaaaaaaattagctgggcatggtggcgggcgcctgtagtcccagctacttgggagactgaggcaggagaatggcatgaacccgggaggcagagcttacagtgagctgagatcgcaccactgcacaacagcctgggtgagagagcaagactccatctcaaaaaaaaaaaaaaattgtgaatacttggccagacgcgatggctcacgcctataatcccggcactttgggaggctgaggtggacagatcacttgaggtcaggagttcaagaccagcctagccaacatggcgaaaccccatctctgctgaaaatataaaaattacccagacgtgttggcttgtgcctgtaatcccaactactcaggaggcttaaggcaggtgaatcacttgaacccaggaggcagaggttgcagtgagccgagatcgagccactgcactccagcgtgggtgacagagtgaaactctgtctcaaaaaaaaatatatatggatacttaagagtcttggagtgaagtatattgtcatttagtgtactgttctgggctgcttcatatgaaaatgttagtaaaatattgtttgattactttttcagataacactgaggttgcatatttaaagacacttaccaaggaagatatcatcaaattctacaaggtaagtcaaattcatatatttagattttgactgatatgaaagtattatagggctgggtatggcggcctacacctgtaatcccagcactttgggaggccaaggtggaaggatcacttgaggtcaggagttaaagaccagcctggccaacatggtgaaaccccatttatactaaaaatacaaaaattagctgggcgtagtggcatacgcctgtaatcccagctactcaggaggctgaagcatgagaatcgcttgaacctgggaggcagaggttgcagtgagtggagatcatgccactgcactcctgtctgggtgacagagcgaaactgtgcctcaaaaaaaccaaaacacctattgtatgtgctatattgtgtgttgctgctttgaagccattcaggctggatttatgaaggtgtttttgtggatttgagttttttgacacaaacgcttaatgacttttagaataaagatagtttttattgaaccaagtactgttttcctctccctctaaaccaagtttgctgaacctgcagcctgcgggccatgtacagcccacattatgagatattttgcaaattttttttcttttagcttatcagctattgttagtgtattttatgtgtggcccatgacaattcttcttcttccagtgtggcccaaggaagccaaaagattgacccatgctctaaaccaaggactgtgacagcccttcctgacttccagatctacctttttaggcaccctttcagtttcttctctctgttctccaccctactctgcaaagaatattgctgagcttgtttggtgggaaggaagaacaaagaaaacaaaagaacttgagaatcagattattttccaagctctgacaactataaattatcttcacccatttaggtgccactgtggctgctttttaaaataaatgattactcacctttgaattgtggtcagagatattataagttttacatgcttgcgctcacttaggaagtctatcaaaaagaaagggaggcaccaccattaaagtcttcccagcaagctttaagagattcacaccggctgggcgtggtggctcacgcctgtaatcccagcactttgggaggccaaggtgggtgaatcacgaggtcaggagttcaagatcagcctggccaacatagtgaaaccctgtctctactaaaaataataataataaaaaaattagctgggcatggtggcgggtgcctgtaatcccagctactcaggaggctgaggcagaagaatcacttgaacccgggaggcggaggttgcagtgagctgagatcgcaccactgcacaccagcccgggcgacagtgcgagactctgtctcaaaaaaaaaaaaaaaaaaaaaaagaggttcacaccatctaaatcttcccctatataaaaattctaagaaggatagcaaaatttccattaggtaggtatatgaatgtgtaataagtatgctaaatgcaaaaactcaaaatttgtgctgcaatggaattgcacctaaagtgttacatatgttttttgtaatatattggggcctctagtttgtgtaaaatactcatatgcctatttttcaaaataaggagcaaaattatactctgtgattaccatagtaccttagaattgtcccttaatgttctagccatttctggtttgtatctgtcattatgttgtttggacggggactcagtcctgccctgtgcccacatccttttagagagatactctacagtatttttttctagggatgtactatagctaccagcataggagtcagtgcttacagttctcattagaatgactttgtgaagttagtggtacaatgaggcttgatcacattttctcctgtactagggtttctaatgtttatttaattcaccactcctagtgctgagtgagagggtaaggaaaaagtaacagtctttgacccaaaggtgctgatagtttctttgaggaaaatggtgattttgtatcatccatgagttgcttacacctctcccagcaactcttctgcaaaattattaaggctgtatgcaaacaagtattaatatagctgatatcaccttaacaataagaaaaggagactatagtttcagaactgagcagcagaagccagtattttgaaagcacctttttcagcaatgagatttgacccattttggctacaaaaatggatggctggacaagtgattttctttacctcatggcttcctttgcattgtatagaggaaaagaagtgtctcatctaaattactcttgttcttttgcaataatagcctgtagtcccagctgctggggaggctgagacaggaagatcgctagagcccaggagttcaagaccaaccttggaaacatagctagaccctgtttcaaaaaaaagagagaggggctgggcgtggtggttcacacctgtaatcccagcactttgggaggccgaggtgggcagatcacgaggtcaggagttcgagaccagcctgaccaacatggtgaaaccccgtctctactaaaaatacaaaaattagccaggcgtggtggtgcacgcctgtaatcccagctactcaggaggctgaggcaggagaatcacttgaacccagaaggtggaggttgcagtgagccaagatagcaccactgcactccagcctgggcgacagagcgagactccatctcaaaaaaaaaaaaaaaaaaaaaaaaaaaaacagagagagtatttataaccaggcctaagctaagtctggaacagcatttccctagctgtgttccatggtatgcaagatattaataggggtacctaggaaaagggtttcatgaccatacaagtttgggaaagactattcgcattcttagagaatcagagtgtattggtattttagaaattataagaagtcccacagtaaagactttagcctgcatttatttaattttgactaacattttctaaactgatttcaccatgcatccttttttacacagaatacctataaatatctcccaggactgtagtgttccttagaacatattaatagtttgcaagaaggtgcagttgtttgtttttagaaaaatgaggattgtccagagttggtcagaaaatcgggaacaatctgaaactggagaaggtgttctgctgtctgctgatgtgggtagacaagggggtaatgaaggtttgggtgacaagagatggagaagagatctttggaagcaaactttttactccagtaagatgaagttcttagatgaggtactacatgttaatagaggcagacctgggctgagttcctggaaagaggctggagaggtcagagcaggcctgtgagaatctgggctgttttgcctgctggcagggagtagagtggggagccacgggcaggattgctgtgcaacatcaacagggcttccttgcagtcacataggaccaggcttattagtaactgcccagttactagtaactagtaacagttattagtaaataactgttgagtggatttggtttggctgatgatttctttcctctaaggatatgaaacgttgcttgtggctaaggaataagaggaactttgtcacaattttgtacccctttagaaaagacagtagaagtctgctgttaagggaaaggttgggacatacttccccacaggatccacctgccaacttagcactgctggcattcatggtagtaactaaggggaatccctccaagcagcatggtggaatggagagagcaagcagactctagcttctgacaccatcacctatgaactgtgtgacccatgtaattcatgtaagctgctgtgtcttagagtccatgcctctaaagtaagaatcatcatgatgcttagttcacagagaattaagtgagctgacataggagagtgcctgatataacgcaggactcagtaattgttagtttcctttctcttttggtagatgaaccacagtttacaagcagagtctgagaaggttcttagaggagcaggcactcgtgcttgtccctgactaagctcagaccattgtctctgtagacactaaagatcaccaagtgcagccctgcacagcccatcccagtgagtactaggctaggtttttaatcctagctcaggcacttattagctgtaggagtttgagcagttttttaatctccttggattcagttttctcatctgtaaaattgggttaaggataattctttccttagagtaagaaaaggaaaggaaaaaaaaagaataattcttgcgtgccttgctaaatctttctagagcttaaataaaataatgtaagtgaggggaaagaaagggaagtatcttttctttttctttttctttttttttttttttttttttttttttttgagacagagtcttgctctgtcacccaggctggagtgcagtggcgtgatctcggctcatggcacatggcaaacttgcttcctcgtgtcaggcaatcctcccacctcagcctcccaagtatctgggattacaagcatgtgccaccacatttggctaattgttgtatttttggtaaagacagggtttcactatgttggccaggctggtctcgaactcctgacctcaagtgatccacctgcctcggcctcccaaagtgctgggattacaggcatgagccactgcacccggccagaaagggaagcatcttttctatatctgactgtgtgatagctgattcttcatagtcttcagagaacacctcattgtaagttctttagtggagcaaaagggtgaccctgctcttctttgtgcctaggaaatgttggcagtagatgctccaaggagacataaggtatccgtccatgttcttgccagggaaatggattcttgtaagtatcaaatgttgcctttttaggctcatgttgagccatctgatggttggcctttgtcatagctacatgccttatagaacaccagaaagtaaaagaggtagagaacggaaactggagataaggtctgcagatataaggggaaaagagaaatgaggtagtgaaggagagaggcaataccaggtgatagaatgccgagctagccacagcatcacaggaaaacacagctgcttgctgttggggtgtctccaaacaggctgcatgaaccactgcatgtggggagtatgggtaagcaagttaacttcccagtcctttcgtttcctggcttttactggccaaagtttgtcctgtggccattaactcccttgctttctgggcagtttagtaaaactagtaagtttactaacagtttagaaacctagcaaggtccttctgggtggacagaaagtcacattagacctgggccctaaaactgctgtggccaaagttttatgacctcaggaatatcatgagccatcactgggtggctctggatagaaggcaggacaagtacttaaggccttgggtagcaggcaacctttagaggatctgagaagtacatgaacggggctggtgcggtgtttttaattaactgagtctggtttagttttttttttttgttcttttgtgatagtatcaataagtacaaagtattaaaccttttattttcttataggtcctgttgttggagagttcccatgtcaaaatgacataaatttgtcacaagcaccagccttgccacaagtaagaaatataacgttatgttagattgtactgacagaggactttctatttagaagaagcagcttggttttttttgttttttgttttttgtttttgaaatggagtctcactcagtcacccaggctggagtgcagtggtgcgatctcagctcagctcactacaacctccacttcttgggttcaagcaattatcctgcctcagcctcttgagtagctgggattacaggcacacgccaccatgcccagctagtttttgtatttttagtggagatggggtttcaccatgttggccaggctggtctcaaactactgacctcaagtgatccacctgcgtcggcctcccagagtgctgggattacaggcacgagacactgtgcccggccagaagaaacttgttcattgggaactaaaagtgatgaactaaaagtttcaggtcaccaggtgttggagcttctactttagttcttccctgaacatctagtcactcagcctctacccttgtctgcctttgcctcctgtttgaacagttgtgttattttgcaatggatcatttctggccacatctgttcccagcactgaatactggagagagacttcttagtctctcccatgttacctgcgtattttaatcatctagaaggattgacattagcttgcaagaggaggaaactggcagtgtaactaggctttttgtgggtgggcacaccagcctctgctactctgctgaagccttgatgcgaagcctctaagtccttggtgagccagcccttgtttgcccagaggaaaaccaaaaggactaaggacacttaccataggtttgtacagaccaattcacgaccctccagacatactgatccagaagaaaggtcagcagatcaagatacatgggttattaggtagagcggcctcaagccaaaacaaaaaaacagtatattaagtagaactgaggtatgctcccagtgtccgccaaaaaaagttgatgtccttattctgatgtttaggttaaatacactaaaaggaaacttttttctttgcagcctgaagtgattcagaacatgaccgaattcaagcgtggtctgccactgtttccccttgtgaaaccacatattaacttcatggctgcaaaactctgaagattccccatgcatgggaaagtgcaagtggatgcattcctgagtcttccagagcctaagaaaatcatcttggccactttaatagtttctgattcactattagagaaacaaacaaaaaattgtcaaatgtcattatgtagaaatattataaatccaaagtaaattacaaaatcttatagatgtagaatattttttaaatacatgcctcttaaatattttaaaatttttcttttgattactgagagaaatttccccaatataacaatgcttaaaatgaatgatattcctatagaatcttccttccctattctgtaaaatagtcacttgtccgaagaaagttaaaagttagctcttttctaaaagcctcctagcttgacatagaaggcttcacaacatttagaaaggtaataactttttaaaaattgatcctcaaatttgctttctacttgatggtttcatgtaaatcagtggaaaacattacatttggcagatgataaagcaatgtcatcttttattagtgaaatgctggttatataaggcatggttttaatctttttataaaatttgaacatgttttttatgccaactcgtaaaatgctagaaaaccctacttatttacaatgctagaaatacagacttaccttacatcaattttgtcctaaaccgaatttctcaggattactgtggtttctttcattctgattgaattatattgacctacttcttcatagttggtttgcagtgttccatgagttttacttttcctcatcaacatattgctttaacacaacatatttatttaacacgtacaaatagggtcaacttcagatcctactgagtgtgtgacatgcttttccaacatcagctttttgtaaccacctgtataactttttattacagtgaaattgcagtcagtatgtgaaccaaaatatcttgcccctttatgaatttaaaaggcagccaatacaaagccacctttttggaaatataaaaagtaaagccttgcattcttatatagcaggtcttcataaaactctaaaatcccttgttgctaccagtctaatcttgccttaaatgttaagttattttttgaatatataaatataaacatataaacacagatgatgactggagtagacttttaaaaaaatatttttttcatgagatactattttaggtgaaattgttactgtagatttaacagctgttttgaaatatttactgttattaaaacttgcttcaagagaaattgtgaatatatttccatatacaagcactagtaacagtaagtggccctgtcatccactaactcaggcaaagtaaagaatggcatttttgaaggacattttacctccccatatgatttgattggctaggactttcttctgtaaagtcataccttttcacatcttaagtttttacatttgccattttccaaatctcaattttgggcaagaacgatatagtcacaactatggggctgctttcaaaagcggggctccatttctactgtcagatcaatgtggtgctgtaaccatctttttatccctaccttcaagaacctccttatatgaagcctgtctttatccatcagaaggtgtgtgaaatcatcacttccttctggttttatgtatttgtagactatgcagcttttcattaaactgcaagtatatacaagacagatctgaaattaggcctgagtgttccgatccaccactgtactagtaaataaaaatccacctaccttttatgtggaaaattatgtgctattgagtaacttttagctcttttttaaaaaatgggtgaaatttaagtgtcttttttatgagaatgacacatgaagagatctgagagcaatctcatgtagtcttccatgaacctgcaattgtttggtatgcgtcagcattttccaatttccaggttggatctagagctgctgttgatcactcaggcatactaatggattcatttagatgggtccaagctgcagtccatgagcaataacagactaccccagatactgcagtttacgcagtgcttagtaaatgagatttgtggaactaagttattagttacctgaggcttcttaagaaagtcttcttttttgaccagttgatgtgaaagagggagcatgtgacacagccagtatggtggagtgctagggttatcctgtttacaataaatcgcctgaatttcacctctggagtctgcatttgtattatttttccagttttagtgaaatagtacagtggccagtcctcagcctacctctcaacatcccagtttgaccagatttcttgctttcattgttcataatgcagaaagcagtgaattatattaacattttaaaagtgtttctgggtaacaatgatttttgtcaaatagaagactcaatttcacaaccttaagaatagatcacttttgtaaaacaagaatctcagtatttgatgttggactccttgctgtgagtattgtcactgactccaaacccagaaagatttgttcctgcccttacagggatgaaaataaaaaggatagaaaaaatatttctctcctctacaatgagtccttacatcttcttgccacatctccagctgcagtttaggcagatatcttgttcaatctctgtcttcttgatccctgtcaaaataatttttctactcatatagtggccagttggctcaggcaggcatttcaagaggaatctgcttgttcctcacttttccagcataggacagtggtccagcccgcacagtcagcattgttctcagggacgatgtggcagccccacacagaggccaagagcaacagagcaactccaggatttatgagttgggacagtcgtcctctcattcatgatacatggagggactcaggggactcagcaggtccccctgttgttttttagggtttttgtttttgtttttttttgagacagagtctcgctctgtcagccaggctacagtgcagtcgtgcgatcttggctcactgcaacccccgcctcctgggttccagcgattctcctgcctcagcctctggagtagctgggattacctgtgcgcgccactgcgctctactaattttttgtatttttagtagagatggagttttgccatgttggccaggctggtctcaaactcctgacctcaggtgatccacccgccttggcctcctaaagtgctgggattacaggcatgagccactgcacccagcccacagtctttcaacagggaggatagtgataaaaaatttcatcatcccagattttcagaggtggaaataggctcagaaaggctgaatagtttgcccaggatcatccaggaagcagattcaaacctccactcagctctttggactttagatctcattgtaccatgtggatttcctgtagtaatagcttccaagccgatgaacatccttgtaaaacaaatagacagttgcttttacatgtgtatataactttacctttttctcatttactgtcttacttgatctcttaaccttgcctattttggggggcatgagaccagatctcacagtcttacacagtccacttcgccaggctactttgagaccagttgtcactactgcctgcagaatctccttcccttccttttgggggtaatccaggtcttaaaccagtgtaagctctttttcctattgctctggagtgatagtttctaggatctttcaagaagtttggaagaggccaggcatggtggctcatgcttgtaatcccagcactttgggaggctgaggtgggtggatcactcacccacctggtcaggagttcaagaccagcctggccaacatggtgaaaccccatctctactaaaaatacaaagttagccgggtgtggtggcaggctactcaggaggctgaggcaagagaatcgcttgaacctgggaggcggaggttgcagagagcggaggttgcagtgagctgagatcgtggcactgcactccagcctgggtgacagagtgagactctgtcttaaaaaaaaaaaaaaaaaaagtttggaagaggagtgtgaggaagagtcattttcacttgtgacaccaccacagagacagccactgcttgcatggtgtttctctgcagtcttcttcctgtgcatataggaaggggtcacgtactcagtgtgggaactcttcccctcagtagcctatttatactgagcattttccacatggatacccttgaaaaaagtatgtcttttgttgttgttgttgttgttgttgttgttgttgttgtcggcggcggctctttggtatcgtattgtttgtttattgaatcctctgtgggggttttacggtgttttcaagttctgatctgtgataaactttcttgtgcagagtatgtgtgtgattttctgattattcccttaaattgccaggttatggaatatgaatatattatttaactttatatattgaaaagtgtttaatctacagaaaagttgttgaaatagtccagtgaattcccatatacccttccccctgtattgaccaatgttgtttgtttcatatcctgtccgttctctctcttatgtgtgtatgtgtgcgtgcgcacgtgtgtgttttgccaaatcatttgagagtaagttgcagatgttatgactccttacccctaaatactgcatcaagtgtcttctaataacaaggtcagtatgtgataaggaattttccgtcactcagagggaagtctggcctttgtcttctttctctttgctatagacaactatataccagtaaatctgacaacttagatgagatggacacgttccttgaaagacacaaattgccaaaagagacatgaaaagaaatagaagatttgaatatttccttacctgttaaagaaagtgagtcataattgaaacccttcccataaagaaacttccaggcccacatgacttcactaatgaattc

SEQ ID NO: 187 - DNA, 128034 bp, Homo sapiens
  allele 2456,3279,3407,42943,69586,107395,112114,117803,89301,124565,: N is any
  allele 17095,17242,33590,38903,43391,45017,68906,68973,73772,74084,83024,83104,105060,108489,111914,113142,113591,114683,116662,62498: N is any
cagcacttgggaaggccaagacaggcgggtcacncgagggggggagttggagcccagcctgatcaacatggagaaacccgtctctactaaaaacacaaaaattagctgggtgtggtggcgcatgcctgtaatcccagctacttgggaggctgaggcaggagatttgcttgaacctgggaggcggaggttgcgctgagccaagatcatgccattgcactccagcctgggtgacaagagcaaaacttcgcctcaaaaaaaaaaaaaaaattccttttctttcctctgctaaaacatctggggggacaaaagatattatttttctgaacattaccaattaggaaataaacgccaatctgtcaccactgggcttcctttttaagtttttttctttcaatcattaggaactcctgactcagctctatggtgaactctattctatctgggctaatggaaggaacttacagcacagataaacactaatatttggcttccagtatatcagaatacttatatttgaatatgtgtctagttttcctatctaaggcaaagaatgacttcagcacattactttttctgcttctaaaaaagttgtaggccgggcatggaggctcacgcctataatcccagcgctttgggaagctgaggtaggggggatcatgaggtcaagagatcgagaccatcctggccagcatggtgaaatcccgtctctactaaaaatacaaaaattagctgggcatggtggcgtgcgccagtagtcccagctactctggaggctgaggcaggagaatcacatgaatccgggaggtggaggttgcagtgagccgagatcgcgccactgcactccagcctggtgacagagcgagactccatcaaaaaaaaaaaaagaaagaaaagaaaaaaaagttgtctaggtggtttacaccttatacttgtttgagtgagagtgggaaagattacaccctagaccttcacatttcctactttttctcatcattctggggtctgcctgaatgtcacttcctcaaagaggcctttcctgaccacctgttccttcatatcacttactcacttgattattatctgtttttcccacacagctagaaggtaatctccatcaagacagaaacttttgtcttttttgtccactgctgtattcccagcacctttataatacctggtatctgtaaggcattcaacaaatatttgtcaagtcataaatgagatgagcaaatcacaggttttggaataagacagtcctgggttcaaattacaactccactctttttgtccaattgttggcaagttactcaacctctctctgccacagcttcctcatctctggtaggtgaggaaatatccattacagagggtggtcatgatgactaatgaaggagccatgtacaatgccagacacagagtagactctcaaaattgttacttttctttccatccacctcctctttattgagatgatagttatgagactatattaatattaatctttcttatccaggacatctactccaaccagagggaaatttatcatgaagctaatgaagtttaaacttcagggctgctcacttgcacaggctccaaactgggagttgtagagggaaagccagttgttgtctggaagcattttttttttttttgagacatagagtctcattttgttgcccaggctggagtgcagtggcgtgatcttggctcactgcaacctccgcctccagggttcaagtgattctcctgcctcagcctcctcagtagctgggattacagacgcatgccaccacgcctggctaatttttgtatttttagtagacacggggtttcaccattttggtcaggctggtctcgaactcctgatctcgttatccgcccggcttggcctcccaaagtgctgggattacaggcatgagccaccacgcccggccatctggaagcatttttatgtaagcatttctaataagtagcctaaagagatctcaggaaaaaaaagggtactaatctccaagtctcgagtatttgttgtgatgtattttctctctatagtaatcttctgattgctaattttgtatttataatttgtattttatgtctcaaagaggtcccccaaattgtatatgtttcaagccctccaagtctgaatctaccccagcccatttatagattccattaatggagcataaatgtattcagaaaggctgcattaacactctcagaggagctgcttcaaggtgattgactactctgcattgggactggtaatttaaaggttcttaaaaccatgcacttgcaaacaccactaggaggcttgccataatttttacctgttttcatccaaaggtttgcctttaggtgaaaccgcactgttaaaaagatcgtgggtacgtcttcgataaagcatcaacttgattaaggaaccctcctactgaattcccatttaaagcaatacntggactaaggacaccgtttttggctgcagtcttgatcgtctgtcaatcagaaacctaaaagtacttaagctggcaagtcaccatccctaatagcattcttccttaaagactcccataaggtattatggaaagttagattcataacaactattaagttgttcgtgggtgcaaagccccataaagccactggggagaaaattctttgtttaaaaagtaaccactgaagccgactgacattagtagtattcctagtacggagtactaacaagagtagtagtttctactctggatttgaagccttgttttgctgcggcgcccgtcccatccgcaccttcctcttaagagagctgctaacttccccaaggatggaaacgtccccctgggtcctggcctctctatcgctgacccctgcgtctgaatttcccccacgccgcactcgagccttgtctccagcgcatctgtgccttcgcggtccacgtccccaccgcgctctagagggagcccgcgggccgcgcgccggccgcggattcattttacgtgaggccgccgcgaccacgaaccttgttccaacacctgcagggtccggcacgctagtcagtgggggtgcctcagaaaacatagccccgtgtgccctcactggatttatgagcggcccctcgccccctcacagtcagacacacgtcgccaccctcacaagtgcggccggtgggatctagctgggaccctccccgcctgggaaagtctgggtgctggctcctaaagcgccccggccaaacccctgtccctccagtccgcctgctcaggcctcggctgtccgcggtcntcaccgtcctcgcctgcgtcctggccccatccggctccaggcaaaacccggagcagctacctctccgcagctcccgggagaccgcgcggcgccgcggctagagcatgcgcagtgcgcagggccggctngaagcgcaagcaggaagcgtttgcggtgatcccggcgactgcgctggctaatgcggtaccggctagcgtggcttctgcaccccgcactgcccagcaccttccgctcagtcctcggcgcccgcctgccgcctccggagcgcctgtgtgggtaagcggaatggagcgcccgggccctcgggccccgtgggtcacagcggtttggcgctcgggttgcaaagtggtgattcagcacttaaagccgccaccgctgcccctcacgccgcccgtcccgccggcctggggcccgtactgccgcgctgaggccgccccagggcccggaagagcggctcgccaggcgggagccagaggcctggtccagagtcggggacgtcccttgggctggtgaggggccggggccgctacccggggccacggggcgtgtgccactagtgcggggggcgcaggggcggacagagtcacccggcctgcacctgggagccgcgccgcgtcactctcccggagtccgcctgtgagggggccgggaacctgaggcggactcgagccgtggggtaaaggaatccggcgacttcggggggaccgcttctcaccttgccctcagccctgcccttttctccgggcactgagtttccaggaccgtgtggaatgcccgcgctgggaaaaaagtttgcctgcctcccgccttggaagacgagtgtggggtttcctatcgggggacatttaggagccaaaagatacctcgggatcctctacagcagctcccttgttttacgtcggagacaaccggagctccgagagatggcttgatttcccagcaactgccgagattgtggcaaaaccaggattaggacacaggttttttgccatccggcggcgtgccctctccactgcaccgttgatctgcgtacgctaggcgttttcaggcttgtagtgaacgctgaatactttttactacgaatggaagaagataggcagtattatcttgccctccctagaaacgttatttgaacccctgctggttttaatcagtaatagccagcacctactaagtgcagggcactgtgctggaccctctatgtaaagtatgtgtctgccttccaaggaactttgacttgattggagcggattgggatgccacgggaattgagatagctacaagggtgtgttgatgagggtcagaagatgggtagtatgggtagtgtgtggggccagagatgggggggtaggctggctttggaaggaatggcagaaaggttggagtgagggctggcgtgggcgtaatccagcctagatatgcgggcagtttgtgttgggggagcagtgagccgattagtctggttgaagctttatagaatttccttggggtaattagaaggacacaagtcctgtattataacagtagggtaatgctggcctgggtcttgaattttagttgggattttcccaatgcgtagtaggtagggagccattaaagtttttgagctggaaagttatctgatggaactgggggtttaggaaagtagtttggtggctgtgtgcaggatgtcaggaagtggagagagtcctaaggcagagaaacctgttgggacttagtctttactgcctgtattaggatggtagcagtggggcactaagataagctaatacaaatgaagactctatggaacttgttctcctctgttttccactacatcacaaaatctcctataatgtgcaaaagacccctgaacttagagaatcaggtggtaagcacaggcaggatgcctccttttgtcctcttttgtgtcagtctgcttttgttctaaattcattactgataggctaggcttagctgtctccatactgtctccagcatatagcatttgtgatttttaaagaaagcaccaattttaagttttgtataactaagtggtttgtatgttctagttaaaattacattttctctgtagttataaagtccggtcgaccatccagagttttaagatatgtttttctcaaagatggaaatttgagagattcaaagcataatgaatgagatgagccagctagaaagctctaccctaaaatcagtgagtgaggcttttgaggaaaatacaggtccaaccaaagggattagggcatagttttaggaaggaaagcactaacatctgaagctaccacatattctcatcttaaggaatgcaatcagccctactgtacatagtcggaagaatgtcttaacagagatagccacacagctatttgctggaagagctgggatttaacccatgtctatctggcatcggagcctgagctcttaactgttatgtatttgcaaacacaagtactgcctctgctggtatttgggcattcattttctggtctaacctcttgagacagagatggtcttaaagcatttatgtaagatcaatccatttacagagtaacctccttgttctgtgttcagctgtattttataacttgggactgtgtggaattatctgaactactggggcacctggagataatagcccattccctggcaacaacttgagccacctgggcatcagtcatctcactttgcaggcagccctactttgcatttccctgttccataggcttaggaaacagtggtatgtcagttgggactatcaacattcaagcttttaaactactgtcaatcagaaaaatgccttttaatagtgtaaaagaacagggtacccctgaagtttctttaacctaatccacacattctgcctgtcttgaaagttagggttgaggccaggtggggtggctcatgcctgtaatcccaacactttgacagggcgaggtcggggggatcacttgaggtcaggagttcaagaccagcctgggcaacatggtgaaaccccatctctactaaaaatacaaaaaaattagccgggcgtggtggtgggcgcttgtaatcccagctactcatgaggctgaggcaggagaatcgcttgaacccgggaggctgaggcaggagaatcgcttgaacccaggaggcggaggtgcagtgagctgagatcgtgccactgcactccagcctgggtgactgagcgagactgtgtcttaaaaaaaaagaagttagggttggggacagtctccccagggtaggggagaaaaagttcagtatgttttcttttttttaaagttcgagacagggtttcactctgtcgcccaggctggagtgcagtgatgtgatctcagctcactgcagccttcatctcttgggttcaagtgatcctcccacctcagcctcctgagtagctgggactgcaggctcatgccaccaccccacaactaatttttgtatttttggtagagatggggttttgtcatgttgcccagggtggtctcaaactcctgggctgaagcaatccccctgcctcccaaagtgctggggttacaggcatgagccactgtgccaggcccagtatatgtttcataaacactggtttcctttctgtttttctgttggtattttatatctcctaaacatgtagccagaggatcaggctaccttttagccaggatgacaaggctagagcactttccctccacaggggtagatcctctatagatatgttaggttctggagccttctcatttggcttgtcttcagtctgttttcactgttctgttagtttagacattatttgaatgtctactctgtagtgatcacacactgtgtccagtactatgtaaatgcaaagataaccataaatcttgtcctcaaggagctttcagtaataaacagtaaactgctttacctctgaccttttactagacacctccacttttatgttttgttgtttctttcaattaattttgaaaaacaacttagtattttatcaccatactgattacttttttaaaaagtgggactcacaaaattattttattcttctcaaagaactgtttagtttctttttgcctattaaaagtgtaactttttttttttttgagactgagtcttgttctgttgcccaggctggagagtgacacgatcttggctcactgcaacttccacctcccgggttcaagtgattcttctgcctcagcctccagagtagctgggattacaggtgtgtgccaccacacacaactaatttttgtatttttagtagagctgggatttcaccatgatggccaggctggtcttgaactcctgacttcaggtgatctgcccaccttggcctcccaaagtgctcggattacaggcgtgagccactgcgctcggaataactttttaaagtaggactcacaatctgctttctgaagggaaggcatcacactctgcctgacacatagtaggtactcagtacatatttactgcataacttaattgattaatggtcttttttcaaaacaatttttttctgtagagtccttagttttgctatgttgttatcattttttcagtttagcttgaaaatgagagttttcagtttagcttgaaaatctttgaatctttttccctcattgcctattcccaagacccaatcctcctgagtctttcatcctaaagattcctaaagtttcttggagtgatcttgaccctcatcaccatcctagttcaggccatgatcatcttcgtaacatcttacatcagtgagattatctcacctgaacaggttttagaactgacttttccagccttctgtctccctactagttgattcttatcatcacatcagattaataaaccacttttcccaagctgttgtctcgcctaaatatcaccagtggttctgtgctatttcaagatcaagttcaaacttcttgacccagcatgtaagcattctgttggctggcttagcccaacttttcagcctaactcttctccagtcagacttaccaatttgctgtctccttttacatgacctattcattcccaattccgagatgccctttctgtcttttctttatatgactaaatcctttattctttttaggccttgttatacaggtcacacaattactcttcctttttctcaacttaataatttttaaaaacattgtgaaacatctatttgatgtttatatattgcctcttatttttttactctcttatttaatattgtacatgccagagtatataggacaaagaagaaaaaaacacctgtgtaccatctactttaggaaacaaacatttccagcaactttgaacctgtctgtgctcacctgtccaattataactctgctcctcccctgtaaaggtattgttattattattattattatttttttttttgagaaagagtctgcccttgttgcccaggctagagtacagtggcgcaatctcggctcactgcaacctccatctcccagcttcaggcgattctcctgcctcagcctcccaagtagctgggactacaggcgcgtgccaccacgcccggctaatttttgtatttttagtagacatggggtttcaccatgttgcccaggctggtcttaaacccctgacctcaggtgatccacccacctcagcctcccaaagtgctgggattacaggcgtgggccaccgtgcccggctgtattattctatatttggataacaatttccttagttttctttatagttttatcacatttgaatacttcttaagcagtatattgtttagttttattgtttattttagttttatagcttttgacctttattgcaaacttttctgagttactttttttcatttaactttcatttaacatcattcataaagatgtatgagttcactgctgaatggcagtcatgcaagtatgccctggtatcatattgatcattgcaaaaattctgtaagataggcctaatctatattctgacaactcccaaatgtatttctctagccagaacctctccctcaaatttcaggtttgagtaataaacttcctactcaacaatgtgagtcacactggtctacttgcttgacttgctcttacctcagatcatttgcattgttttccctctgctgagaacaccctgctgctagtaagaatggcgagagctttgcagagaacataggatttgaacaagagtctttgaaggaaatattgaattggatgaacaaagaaggagagttgagaaaatattttattttttggagacaggatctcactgtcacccaggctggagtgcagtggcacgatcaaaactcactgcagccatgaactcctgggctcaagtgatcctctcacctcagcctcctgtagctaggactacagacttgtgccaccatgcctggctaatttttaaaattttgtagaggcaggatcttgctatgttgtccatactgatctctaactcctggcttcaagcaatcttcctgcctctgcctcccaaagtgctgtgattacaggcataagccaccacaaccagaagagaaaatattttagatagaaggaatggtattagcaaaggttcaaaagtagggaaattcacaatatcagcaaaggaaagtgaaattttgtcttattggatatagagaacctcagatgctttttgagcaattcagtgacatatgaaagctgtatttttggctaattaatctggctgttttttgtaagcactgtttgaaacgcaggcagagactgatgagggataaagaaggtagtacaaatgacaaggaaagaagagtgtctgcagaagacatgtgcaagaaggattcagcagagtttagttattgattgatgtagggacgatgtgggagtcagagaagcctgaggtcttgagcgtgagtgactttgagtctagaataggaggggccaccagggtagggaaaactcttgtcggggagacccagctctgggaagaagttcagctaggtgagatgtttgtcctgcctggcaggtggcaggttttccaaaggcataccaagagaacgaaccactgcttgggtacagcagtgggcacagtcttgtaggcacttttgggctggctgttaccctcaggtcccgtagggtagtggacaggactgagcggtccttaaatacccaagggaatgaaatctagtttgtagattggtagctcagggactagttcaattgaaagatcagaaccacattgatgaatactgacctactactggggtttcttatttgttttgcttaaggataggaaatggatccagagcctagaacaagtctgacctgtgctggggtctaagtggattcagctgtaacgctcttgctgctgctgacgatgttaaccataaaagatttagtagctaatatttattgaatgcttattgtatgttatgcttttttgggtggggggtagtcatcccctcaagcatttattctttgttacaaacaatccaattaaactcttttagttattttgaaatgtgcaattattattgattatagtcaccctgttgtgctatcaaatcctaggtctttttttttttctttggtacccattaaccatccccacctgccctcaaccacccactacccttcccagcctctagtaaccatccttctactctctatctccatgaattcaattgttttgatttttagatcccacaaataagtaagaacatgtgatgtctgtcattctgtgcctggcgtatttcacttatcatcataacctccagtttatgcattttattaggagctttgcctatgttgtgtgtgtgtgtgtgtgtgtgtgtgagagagagagagagagagagagagatagagtctgactctgtcactcctaggtggagtgcagtggcgtgatcagggctcactgcagccttgacctctctgggctcaggtgattctcctgccatctcagtactcccctgtttcctgggtagctggggctagtagctggaacttggcacataccaccatacctggctaattttttggagtttttttttttttttgtagagacaggatttcgtcatgttgcccagactggtcttaaactcctcggttcaagcagtccacctaccttggcctcccaaagtactgggattataggcgtgagccactgcacctggctacatatgttgtcttgtttaatggccacggtaattatgtgggagagtggtggtggtagtcttttttttttttctttcagataaggatattgaagctcaaagaggttaacttgctcaaggatacacagctagtaagtggcttagcgagatatgaattcaactgggctcactcaagaacctcaggggttggccattatattgtcttcttcctagaggtagcacgatatctttagtagagatggggacgttaaaacagggagattttttagaaagaatatacatggtagttgatgatattgagtctgaagtgattactggatagccaaggggagatctgcaggaagcatttgaaatatgactggaacttggtaagaaggcctgagctgatttcctaaatctgaagatagagttgaagacacggacatggatggatataggaaaaataatctatgtttagatgcggtgggggagggggcagccttgacaatgctcacatttaggtataagaaggaaacatagttggagaggttgggagttagagaggtggaagatgatatcggaagtgaaatagtctgaagttctagccaaagagattttggggagaatagggtcttgagaaaagaacaaataccatttctttctttcttttcttttttttttttttttgagatggagtctcgctgtgttgcccaggctggagtgcagtggtgctcactgcaacctctgtctcctgagttcaagcaattctcattccttagcctcctgagtagctgcaattacaggtgcccaccaccatgcccagctaattttttctttttttttttttttttctgagacagagtctcgctctgtcacccaggctggagtgcagtggcgagatcttgacccactgcagcctccgcctcctgggttcaagcaattctgtttcatcctcctgagtagctggaattacaggcgcccgctaccacgccggctaatttttttatatttttagtagagatggggtttcaccatgttggccaggctggtctcaaactcctgacctcaggtgatcaacccacctcagcctcccaaagtgctgggattacaggcatgagccagcacacctggctactgttatttcttgatctcttaattttagaaattttctgttgctttgttatgcccagctattttatttttttagagatggggtcttactgtgttgcagaggttggtcttgaactcctggcctcaagtgatcgttctgcttagcctcccaagtagcaaggattacaggtatgagccatcacacccaactgtttacatatttctgattcttcccacttgatcttatggtcctatggacatttagtacagtttcagtttttttttttttttttttttttttttttttttttttttgagacagtctcgctttatcgcccaggctggaatgcagtggcgcagtctcggcttactgcaacccctgtctctcgtgttcaagcattctcctgcctcagcctcctgagtagctgggactacaggcgtgtgccaccatgcccactaatttttgtgtttttttagtagagagacagggtttcgtcatgttggccaggctggtctccaactcctgacctcaagtgatctgccggcctctgcctcctaaagtgctgggattacaggtgtaagttaccttgcccggcctagtacagtttcttatatgatcaaatctattagatgatctattggttccatattttctccttggagactatccttcaggacactttttccttcttgctgtagtttgaactagttttctccaggcttgctacagaatggttgcctggaatttccctttgcttctctcctctaatggatctgtttcctggttctcaaatttttttctttcttggcttgctccttcattcaagagtagttgtatattggaacaagctttcatgtaaagactacatgggagataactttttgtagatcttctggtgatttccaaacagaaaagtatagatctgggtcctagtgtgaatctacacctttgtagaataagactacaaaagtgagagagatgacctgaatggcttccactccctccatctagctctagaattctagtattgtaagtacttgggaattaagttattttacaggttatctagcatatggttaaagcagcaagctttcagggatatcctttgtgagactttgacaaaaaagacatatggcttcttttttcccctccctttaaaattgaactttaagatttttttaattgaacttaaagatttgcttttcttttctttttttctttcttttttttttgagacggagtcttgctcagctgcccagctagagtgcagtggcgtgatcccggctcactgcaacctctgccccctgccccaggttgaagcgattctctgcctcagcctcccaagtagttgggactacaggcgcgtgccaccacacccagctaatttttatatttttagtagagatggggtttcaccatgttggccaggatggtctcaatctcttgaccttgttatctgcccgcctcagcctcccaaagtgctggaattacaggtttgagccaccatgcccagcctttttttttttttctttttgagacagagtctcactctgtagcccaggctggagtgcaatggtgcaatcttggctcactgcaaactccgcatcccagattcaagtgattctcctgcttcagcctcctaaggagctggaactacaggcatgcacccacacacccagctaatttttgtatttttagtagagatgggggtttcaccatggttttttcccccccgaggtggagttttgctcttgttgcccaggctggagtgcaatgatgtggtcttggctcactgcaacctccgcgtcccgggttcaagcaattctcctgtctcagcctcccaagtagctgggattacaggcgcctgccaccacgcccggctaatttttgtacttttagtagagacgtggtttcaccatgttggccaggctggtctcgaacgcctgacttcagttgatctgtccacctcggcctcccaaagtgctgggattacaggcgtgagccactgtgcccagccagggtttcaccatgttgaccaggctggtcttgaactcctgacttcagatgatccacccgccttggcctcccaaagtgctgggattacagacgtgagccaccacacccagcctgcttttctttttatggaggaagtaaatttgaaattttgcttttaaaacaagaaataatgaaaacaaacattagtcacctgattttccttcttttttttctttcttgagttggtgaaagtttctcccttcccattgttgggctactctgtggtttctgtatgctctgctgatggccaatataggctgggagtgttggataacatttggtccagggtaaaatattcttgaattcagcttctgttccaggaagatatcagtaagattgacacctgttctaagtttgtactccagactactttaaactgccatccagttgaaaaaaatgccttattctctctatagtctatccatttgggagccagtgtgatgtagtggaaaagtcactctgacttgacacttggttattctttttatcttgaattggttagtttgcatgagtctttttcctagccaccagactaagtagcttcaaatatctttattaatcctaccaagttttggtttctgaacgttgccttctacaggtgcatagttctttttcctttcttgtgcttacatatcactaactcctcacttgatgttgcttttattttagagagtatgaccgactataaatgaggtcactgtagaccagtaggctgggatgtggcatgtggatatgttttgcagttgttattttttaaatgggaatcaacacttagaaatcctgagagttcagttccttttgggaaaaagggataatctggtaacagtgggcccacattcctgcctggcagcaattagcttgagctagggaagatttgtctttcagaaggggcatgcattccttcttacagcctgctttgcttatttacattacttttttggccttgtaaacattatatttgtgatccgttctatacagtgattggaggaagttagtcttagtagttttcagacatactggaggtttttgttaataataaaaatgaaacaaaatacacatgtaaattgctccgaaagtacagaaatgattgtgtaatcaggactaccctttgcctcatttaaagtttacgaagattatcacatcatcttattttattttatttttttttggtgacggagtctcgctctgtcacccaggctggagtgcagtggcgcgatctccgctcactgcaagctccgcctcccgtgttcaagccattctcctgcctcagcctcccaagtagctgggactacaggcacccaccaccacgcccagctaatttttttttttttttgtatttttattagagatggggtttcaccatgttagccaggatggtcttgaactcctgacctcaggtgatccgcccgcctcggcctcccaaagggctgggattacaggcgtgagctgccacgcccagcttacatcatcttatttgatccttgcaggactaccctttgcctcatttaaagtttacgaagattatcacatcatcttatttgatccttatggcaactataggaggttgacagagaaatgaaaagtcccacagctcttaggaagtctactttagacagctgtgctactgctgagttcgccttacttatttatttatttacttatttattttttttttagacggagtttcactcttgttgcccaggctggagtgcagtggtgccatctcggcttactgcaacctccgcctcccaggttgaagtgattctcctgcctcagcctcctgaatagctgggattacaggcgcccaccaccgtgcccgctaatgtttgtatttttttagtagaaagacagggtttcaccatgttggccaagctggtctcgaactcctgacctcaggtgatccatccaccttggcctcccaaagttctgggattacaggtgtgagccaccacgcccagcctgagccaccacacccggcctgagttcgccttattgtctagaacccaggtgaggatggagtgaaggtggtgggtgtggaagagcatgttagctttgcttctaggaaagtaagtggagctatcagcctgagctctgtgagcatgcataaaaggagtaacaagtcacttctctcaatctttttttttttttgagacggagtctcgctctgtcgcctaggctggagtgcagtggctccatcttggctcactgcaacctccgcctcctgggttcaagtgattcttctgcctcagcctcctgagtagctgagactacaggtgcgcaccaccatgcctggctaatttttgtatttttagtagagacgaggtttccccttgttgaacaggctcgtcttgaactcctgtcctcaggtgatccacgtgctagggcctcccgaagtgctgggattacaggtgtgagccaccatgcccagctcacttctctcaacctttgaggcatctcttgagttgctcaccaagaagagagggagaaaagagagcaaacagtgtacagtaagtcaagaagacgatgagtgtaatgtaacaaggtagggnagaccaagaaccttttggagcaagatggctacattaggatttctggtcagtcaggtcacataaataaggcagataggaacgttgacactgggaagacaccgttcccagaagccaaatagacaagactatctggccagtcagatacanggttaaactaacagacttttaaggaaaatgaatatgttatttgtacttacagtcaaccagccaaactattatcgatattattatatggcaacaacatagcatctttctagaaatattaatgaacaaattaggaattgtcataaaacagcaaaaggggcagaggaaatcaatgaagcacactagagtttaactctttcccttaaacaattgagtttttaaataagtaaatcctgtgactcccagactgaggcaggaggattgcttgagtccaagagttggaaactagcctgtgcaacatagtgggaccctatctctacaaaaaataaaaaattagccgagtgtggaggcacgtgccagtaatctcaactattccagaggctgaggcgggaggattgcttgagccggggaagtcaaagctgcaatgagccatgattacaccattgcactccagcctgggtgacagtgataccctgtctcaaaaaaaaaaaaaaaaaaaatataccattcatgggttttagtgtatttgcagagttgtgcaaccatcaccacaatcattttaaaacattttcgtcacctcaaaaagaaacattataccctttggcagttacactctattccactcttccctgagcccatggcagccactcatctttctttctatggatttgcctgttctggaccattcatacaaatgacatcaaacaatatgtggtcttttgtgtctggctttcacttaacataatgttttcaaagttcattcatattgaggtatgtgtcagtacttcattcctttttagtactcatagtattgcattgtatggatagaccagattgtatttatccattcattagttgatggacatttggattatttccagtcttgagatataatgaataatactgctttgggcattcgtgtacaagttttcatgtgaacacttattttcgtttctcttggggatatgcataggagcggaattgctaggtcatatgctaactcttgtgtttaaccttttcaggaactaccaggttgtttttcaaagcagcggcactattttgcatttccaccagcagtgtgtgaaaattccaatttctctatatccttgacaacacttgctatatgtacttttgttataagccatcctggtgggtatgaagtggtgtctcattggaattttgactttcattttcctgatgaccagtgagtatattttcatatgcttcttggccatttatatatcttctttagagaaatgtctactcagatcctttttctatttgttaattgggtttttttttttttttattaaagttgtaagagttttaaaatatattctctaggccgggcgtgttggctcatgcctgtaatcccagcactttgggaggatgaggcaggtggatcacctgcagtcaggagttcaggaccagcctgaccaacaaggtgaaaccccatctctactaataatacaaaaattagccgggcatggtggtacacgcctgtaaccccagctactcgggagactgaggcaggagaatcgcttgaacccttgaggcagaggttgcagtgaggcaagatcgtgccactgcactccagcctgggtgacgagagtgaaactccatcttcaaaaaaatacaaatgaaaaaatatattctctatacaagtcccttatcagatatatgatttacaaatattttatgccattctataggttgtcttttcactttcttgatggtgttctttgaagcagaaagtgttaaattttgttgaagtctaatttgtctttttaaaaaactggttgtgcttttgatgtcatatctaagaagccactgcccaatccaaggtcacaaagatttaagttttcttttaagatttgtattattggccaggcatggtggctcacacctgtaatcctagcactttgggaggccgaggtgggcggatcacctgaggtcaggagtttgagaccagcctggctaacatggtgaaaccctgtctgtactaaaaataccaaaaattagcctggcgtagtgacaggcacctgtaatcccagctactcaggagactgagacaggagaatcgcttgaacccgggaggtggacgttgcggtgagctgagatcacgcctttgcactccagcctgggcaacaagagcaaaacactatctcaaaaaaaaggttgtattgtttaattatttagctgttacatggaagtctttgatctattttgaattagtttttatgtatggtgtgaggtgagagtccaacttcatctttttacatgtggatatccagtaccatttgttgaaaagactagtccttcctcattgaattgttttgcatcctttttttttttttttttttgaggtggaatcttgctctgttgcccaggttgtagtgcagtgactgcaacctccgcctcccaggtttaaacaattcttatgcctcagcctcctgagtagctgggactacaggtgttggccaccatgcccagataatttttgtatttttagtagaaatggtgtttcaccatcttcgccaggctagtctcgaactcctggcatcaagtgatctgcctaccttggcctcccaaagtgctgggattacaacatgcccggccatcatccttttcaaaaataaattgatcaaaaggtgagggtttaactctgagctttctgttctgttccattaatctgtatggttttttttgagatggagtctttctcccaggctggactgcagtggcactatcttggcttactgcaagctccgcctctcaggttcacaccattctcctgcctcagcctcctgagtagctgggactacaggcgcccgccaccaagcctggctaattttttgtatttttagtagagatggggttgcaccatgttatccaggttgttctcgatctcctgacctcgtgatccacccccctcggcctcccaaagtgctgggattacaggtgtgagccgccgtgcctggcccattaatctgtatgtttatcctgatgccagtaccacactattttgcttacaattgttttgaagtcaggcagtttgagtcttccagctttgttcttctttctcaagacttttttgaccattctgggtcctctgcatttccaaacaagttttaggatcaatttgtcaatttctgcaaaaaaggaggcttaggtgggattttaatctatttggggattactgttatcttaaaaatactgtcttcccatccatgaacatgggagtctttccatttaaagtttaagttttacatttcttttgttaaatttatgcataagttttttttttttttttttgaggcggagtctcactctgtagcccaggtggagtgcaatggcaagatcttggctcactgcaacctccacctcccaggttcaagcaattctcctgtctcagcctccctagtagctgggattacaggcgcccaccaccgtgttcagctaatttttgtttttgtttttgagacagactttcgctctgttgcccaggctggagtgcagtggcgcgatctcagctcactgcaacctccgcctcctgggtccaagcgattctcctgcctcagcctcccgagtagctgggattacaggtacccaccaccacgcccggctaatttttgtagttttagtagagacagggtttcaccatgttggccaggctggtctcgaactcctgacctcaggtgatcacctgccttggcctcccaaagtgctgggattataggggtgagccactgcacccagcctgattttcgtattttttgtagagacagggtttcaccatgttggttaggctggtctcgaactcctgacctcaggtcatccacccgcctcagcctctcaaagtgctaggattacaggcatgagccactgtgcccacccagtattttattttttgatgctattattaattgttttcttatttttagtttgttcattgctactgtatggaaatacaattgatatttttatattcaagatcatgtcttctgcaaatggagctaattttacttttttctttctttttttttttttttttttttgagacggagtctcgctctgtcacccaggccggactgcggactgcagtggtgcaatctcggctcactgcaagctctgcttcccgggttcacgccattctcctgcctcagcctcccgagtagctgggactacaggcgcccgccaccgcgccccgctaattttttgtatttttagtagagacggggtttcaccttgttagccaggatggtctcgatctcctgacctcgtgatccacccgcctcggcctcccaaagtgctgggattacaggcgtgagccaccgcgcccggcctacttttttctttctaatttgtacgccgtttatttcattttcttgcctaattggtctgtttagaacttccaggacagtgttgaatagaagtggcaagagtggaaatccttgtcatcttcttgatcttaatggtaaaaacattatctgtcaccattaagtacgatgctagcagtagcttattcatagagtccctttttcaggttgaggaaattctcttttattcctagtttgatcagcatttttgtcatgaaagagatatactgtatttttgaaacaatctcatactgaaaagtttttattgtacaatatagtgcaaataatttttttcctgaaccaattacagtaatttgaccattggatactttagtgtgattttctttttttttttttttttgagacaaagtttttttcttgttgcccaggctggagtgcaatggcactatcacggctcaccgcaacctccgcctcctgggttcaagtgattctgctgcctcagtttcccaagtagctgggattacaggtatgtgccaccatgcctggctaattctgtatttttagtagagatgggatttcaccatgttggtcaggctggtcttgaactcctggcctctggtgatccccccatctcagctcccaaagtgttgggattacaggcgtgagccactgtgcccggcctctttagtgtgattttctatatcatcacaataccatcagaatcagaaaattatcattgatgaatagaaatgagagtgggcatccttgtcatgcttgttcctgattatagaggaaaggctttcagcttttcactgctgaatacgttcattgtttgcttgtcttccatggctcttattgtactgaagtacacaatggaggtattccttgtatacctaatttgttgagagtttttaccgtgaaaggctgttgaattttgtcaaattatttttctgctctatttttccccccttttttcacagctcctgcatgtggcatctgaaagctatctgtgaagaggtatttttctgtttgttttttttttgagatggaattttgctcttgttgctcaggctagagtgcaagagtacagtggtgagatcttggctcactgcaacctctgcctcccaggttcaagcaattcttctgcctcagcctcccgagtagctgggattacaggcatgtgccaccacgcttggctaattttgtatttttagtagagacggggttttcccatgttggtcagactggtctcgaactcctgacttcaagtgatccgcctgccttggcctctcaaagtgttgggattacaggcatgagccactgcacctggccatctttttttttttttttttaagacactgttgcattcttgtcagcctgattggagtgcagtggtgcaatcatggctcactgcagacctaaactcttgggctcaagggacctttctaccttagcatccctgagtacttgggaatataggcatgtgccatcatgcccagctgtttttgtagagacggtatcttgctgtgttgcccaggctagtcttgagctcttgaattcaagccatcctcccaccccagcctcccaaaatgctgggatgacaggcatgagccactatacttagccttttttctgcatctattgagatgattgtgtggggttgttcccccttcattctgttaatgtggtatatcacatttattgatttgcaataagtgtgttgatgttgaaccatccttgcattgccgggataaatctcacttgatcaaggtgaatgatccttttaacgtgctgttgaatttggtttgctagtattttgttgagggtatttgcatcaatattcatcagtgatattggcctgtagttttccttttttgatgtgtctttgtgtagttttggtatcagggtaatactggcctcatagaatgagtttggagttattccttccttgtctattttttggaataatttgagtagaattggtattagttctttaaatatttagtagaattcagcaggaaagccatgggtcctgggcttttctttgctaggagactttttattatggcttcaatcttgttacttgttggtgtgttcaggttttggatttcttcatggttcaatcttggtaggttgtatgtgtctaggaatttatccattttttctagatttttcaatttattggcatatagttgctcataatagccactaatgatcttttgaatttttgcggtatcagttgtaatgtctcctttttcatctctgattttgtgttgtctctctttttttcttagtctggctaaatgtttgtctatattcatcaaggttattggcctgtagttttcttttcttgtaatgtccttgtctggctttagtatcagggtaatactgatttcataaaatgagtttggaggtattctctcttcttttttggaagaatttgagaaagattggtattctttttttttttttttgagacagagtctcactctgttgcccaggctggagtgcagtggcatagtcttggctcactgcaacctctgcctcccaagttcaagcaattctcctgcctcagcttcctgagtacctgggactacaggcgtgtgccaccacacctggctaatttttgtatttttaatagagacaggatttcaccatgttggccaacctggtctagaactcctgacttcaggtgatccgccttcctcagcctcccaaagtgctgggattacaggtgtgagccaccatgcccagcctgctttttctttttcttatttatttatattgctatgaacatacatttatcttaacttacggctgaaaattcagtactatcgttctttgttttgttgctcaaattattatggcttggacccttaggagtttcttcattttggctcctgtgtattttgaataagccccatcttttttagagtattgttttacttctgttctagactcatatttttcttgccctagcccttgaatcaatcacttagttccttttattggaaaataatttttttttttttttttttttgagactgagtcttactctgtcacccaggctggagtacaatggtgtgatctcggctcattgcaatctctgcctcccaggttcaagcaattctcctgcctcagcctccaggtagctgggattacaggcatgtgccaccatgcctggctaatttttgtatttttagtagagatgggagttcaccatgttagccacactggtctcaaactcctgacctgaggtgatctgctcgcctcagcctcccaaagtcctgggattacaggcgtgagccaactcacctgagcagaaaataatcttcgcagaccaagatctgggcactagatgtgctcattgttgctgaggtgtcattgcttctagtggccggccagtctagtgcctctggtggacagccacatatacacgtttttatatttctatgtctttttgtatataataaaaatataagtttgtattgatacctttgattccaacttagtaccacaattgtagccttctcccatttcttatttataacatctttttccaacaatgagaacactggatttcattttctacaatttactttcttatttcctcaattctagtgtacacatagtttcataattgctagctcacctgtgagaaacatttttaaaataggtcacaatatttgcatgtagttctttttctcttaggctttattgtatccagtcaaaatccagctttccatagttaagttcttttcttttacactccttcaatgtgattatgttactcatttatagttgttaggttagtttgttagaatattgattgtttctcaccccacccccccatcatggttggttttattattgtgataaagaatatgtaacataaaatttatcattttgacctttttgtgtgtgtgtatagatggggtctgactatgttgcccagactggtctcaaactcctggcctcaagtgatcttcctaccttggctttccaaagtactggggtaacaagcatgagccactgcacctggcccattttgagcatttttaagtgtattgttcggtggcagtaaatacatccacgttgttgtgtaaccatcaccatcatccatctctagaacttttttcatctcaccaaactgaaactctgtacccatcaaataataactcaccatttcccctcccttcagacccttgcaaccacctgtctgttttctgtctgtgaatttgactactctaggtaccttatataagtggagttgtgtagtatttgtccttttgtgattagctgatttcttttctttttttttttttttttttgagatggagtcttgctctgtcaccaggctggagtgcagtggtgcagtcttgcctaactgcaacctctgcctcccgggttcaagcaattctcctgcctcagcctcctgagtatctgggactataggtgtgcaccaccactcccagctaatttttgtatttttagtagagatggggtttcaccgtgttggccaggatggtctcgatctcttgacctcctgatccacctgccttagcctcccaaagtgctgggattgcaggcatgagccactgcacccagccagcttatttcatttagtatgtcttctaggttcatatggtagcatgtgccagaatttttttcctttttaaggctgaataaattttattgtataaactacgttttgtttactgattcatccatcagtggacactggcgtgacttccaccttttggctgttgccagtactgctgctatgaacatagctgtacaaatatctgtttgagtctttggtttcatttcttttgtatatgtatccagaagtggaattgttagatcacatggtaattctatttctaattttctgaggaactgccatacagttttccatactgctgtaccattttgtattcccactagcaagtgtgcacaggttccagtttttctacatcctcacctgcacttattatttattctattttattttttaatattattttttgagaccgagtctcgctctgttgccaggctggagtgcaatggcacgatctcggctcactgcaagctctgccttccaggttcatgccattctcctgcctcagcctcctgagtagctgggactacaggcgcatgccaccacgcccagctaatttttatatttttagtagaaacggggtttcaccatgttggccacgattttttttttttttttttttttttgagacggagtctagctctgttgcccaggctggagtgtagtggcgctatctctgctcactgcaagctccgcctcctgggttcacaccattctcctgtctcagcctcccgattggctgggactacaggcacctgccaccacacccggctaattttttgtattcacagtgtttttaaaataattatcctaattggtatgaagtggtacttcattttagttttgatttgtacttttctaatgattagtgatgttgagcatctttttatatgcttattggccatttgtatatcttctttggagaagtggctttttaagacctttgcccatttagaaattttttgttgttttgttgcagattttaatatattctggatattaaccccttatcagatattttttcccactccacaggttgccttttcactgtgtcctttgcacagaaattttttattttaatataggtcagtttatttatttatttacttatttacttagtttttgagatggcccaggctgacgtgcaatggcgtgatctcagcttgctgcgacctccacttctcaggttcaagagattctcctgcctcagcctcccgagtagctgggattgcaggtatgcgccaccatgcccagctaattttgtatttttagtggagacggggtttctccatgttgttcaggctggtcttgaactcctgacctcaggtgatctgcctgcctcggcctcccaaagtgttgagatgaacttttaacttggtggagtgttaaacagcatggtcattttgtgtctaaagacttgggtttgaatcctagctcttctattttatacctatgtggttccaaccaaataacttttctgagctttaatttccccatccagtaaagaatgggactaataggatctatataaggggtttattgaatatattatatatatgtataatatataatagatttattccctaaacaagtatatgtgccacaagatactgactgagtattcagtaagcatctgttctgacatactggctttgcttctttctaagcttaaccccttcacttacgtactagattccttactctaggacaaggttcctgtaaagtttccttctctctttctctttcattatcagtttttctcctctctttatgtaaatcttttgtggcttagatgttgattgattgattgattgattgagagatatgtagatacatagatgggagtttaattatagaagcgttctgtactttaatgaggctgtctcttggatttaagtggatagaattggttgcattgattttcatccattattttgggggtaataaaatcagaactataagctagggtctttcatccttagcactattgatattttgtgccaaaatcttttttttttttaagacacagtctcactctgttgcccaggctggagtgcagtggcacagtcttggctcacacaacatccgcctcccagattcaactgattcttgtgcctcagcctcccgagtagctgggattacaggtttgtgccaccatgcccagctgatttttgtatttttagtagagacagtgtttcaatatgttggccaggctggtttctaactcctgacctcatgtgatccgcccgcctcagcctcccaaagtgctgggattacaggtgtggatcatataattctttcttgtgggagatatcccatacagtgtaggttgcttagtggcatccctggcctctactcactatgtgccattagcaccttcagttgtgacaataaaaaatgcctctagtcattgccatatgtcctcagcgagggttggtgagtgggaatagtcacccattgagaactacttactataaacactggctcatctatagcaattataaagggataattatttacctggtttcctaatagtcttataaagtataatcctattatcagcctacctaatgaatgtttttgacctccagagatgacaaataacatctggaattcacataagtatgtgttaagaatgctggtaataacatggtggttatggaggtggttcatttgcaccttagccactgcgaccataataatgatgatgattttataataatcaagttaccattcatggatgactactgtgtaccaggaactatgccttggtgaagtttatataaacatattttacaggagaaactctgtgaaaggttgtctgagtgtgatgcaactataggtgcccctgtcaatttaatgagccatgtatacatttcatctgactctttttttttttttttttttttttttttttgagatggagttttgctcttgttgcccaggttggagtgcagtggcacaatcttggttcaccgcaacctctgcctcctgggttcaagcgattctcctgctcagcctcccgagtagctgggattacaggagtctgacaccacgcctggctaattttggtgtttttagtagagatggagtttctcgacgttggtcaggctggtcttgaactcccgacctcaggtgatcggcctgccttggcctcccaaagtgctgggattacaggcatgagccatcgcgcctggcctcatctgactcttgattgtcaaaactagatgaggccaagatgggcacgatggcacaccatcctacttgggaggctgagatgggaggatcgcttgggcctgggtgttcaagttcagcctgcgcaacatagggagaactgttttttaaaaaaacaagctagatgaggccagaaagtctggtttgaccagaatagtccagtagtatccagtgcctcaggagcagagaggtcatctggtaaaggtgagggtatgtaattaccaaacacgggctggaagtggtcagtagatcagtgcagacagtgaagaatcacacctaaggcaaagtacaggtcaagtttcctgaggcagcattctctgagttgggcagatcatcttctgtacatatgagtggaactgaactgtctgtacagaatacaggttgagcattccaaatctgaaaaattcaaaattcaaaatcagaaatgctccaaaattctaaattttttgagcaccaacatgatgctcaaagtagatgctctatcggtaaatgtaatgcaaatatttaaaaatccaggaaaatctgaaatacatctgatcccaaccatttttgataagggatatttatggtttgctttttttagaaggctatcttgagagaattacttacaggtcgataactcttcccagcctgtgatttgaattgatctttagaaaccaggccaggtgcagtggcttatgcctgtaatcccagcattttgggaggccgaagcgggcagattgcttgagcccaggagttcgagtcatcctgggaaacatggtaaaaccctgtctctactaaaaaaaaaaaaaaatacaaaaaattagccgggcatggtggcgtatgcctgtagtcccagctgcgcaggaggctgaggtgggaggatcacctgagcccaggaagtcatgagccatgatagtgccactgcactccagcctgggcgctgggagtgagaccctatcttacaaaaaagaagaagaagaagaaaaccatgacaggtgtctttaagctgcccttgctgttctgggttcatgaagcatctgtgggaggttgcccatatgtaaaattagttgagtttgaagaaatgttaacgttatatggtattcttttaattttgttttaaaaataatttttctcattcaaatcctgaattagaagttgtttggtataaatattgaaaattgttgaggggagaatttattcaaagtttaatcattttgcttttatctatgttatacttagctattagttactggaagtgtcaagttttatttttagatcttaactagagtctaaagtaattactaaaagctagttttcaaataatatgtaatgagtaaagtcctgagttaaaagatttagcatactgaattaacttagttgactgatgctgtacttacatgggcctcctatttcttgtggccaagatagcatcaacagaaataattgaaataattgtctcgagacacacctgagaaggtttaattatgttaattgtactactgttccttagtgagccttcttagtttagcacctctttggtatgggtagctgctttccagtattcaagtggtactatttccaggatgatttttggcggttgatatttgtaatatcagtaattcatgtatctcccccttccttttattttactgtgttttatgatattttgaaaagctctatttttaagaacttttaattgaaagatggcagtgttcaacttaatgcatttttacaaactgaacgtacctgtataaccagcacatgacctggaaccccaaagcccccttcattctcctttccaaatccaatcactactcccactcccaagggtaatgactatcctgggatgaaagcatagcttgattttacttgctcttctgctttgtataaatggaaggttacagtatttactcttttgtgtctagcctctttcactcaaccctatattagtgagattcatgtttattgtgctttgttctatattattcctttttattgctgtatactttccattgtgtgcatgtacaatttatcatttcactgttgattgtcatttgatcatttctggtttgggctagtttgaatagtgttgctatgaacatataaatgcatttatttgggttatttatctgttactagcattgttaggtcatagtgtgagctttagtgtatagtgccagtttttgaaaatggttgtacccataccaaattgcatgtctgtagcagtgtgtgagagtttgttaacttctctaacacttggtatttgccctctttttctttttagccattctggtaaatacatagtagtatctcagaaaatcttctgttgggaaagttagttgcaaatttgggacctcctgggactttaatctgtcacaccaacttcatgccaccactgaagcctcaataatacctcttcgtccagtacagtccctttgcttagggcaagcatgatcttcagtctgcactcagaattagcagatattcccagataagaaaatgaatgatgattatcagctcacctcagaggttgctcacctttctggaactagtttatccaatccttgttgcttgcacaactttccaacatctttgcaaatgtgatttttgtaatttatcatggccttttctagttgttgaagctgaattagtttgccatgagctgctatatcctacccagaagtggaagttgtcagtagattcttgggattttctatatacataatcatattgcttgagaatcatgttaatttttttcctctttcctttcccatctctatgtgttttgtttctttttcttggtttatttggactggttagaactaccaatacaatgttgaaatagaagaagtgttagtggcatcgtgttggtgggggagggcgggagattgtttacattaattgtaatgtaaactattgagtataccattgagtatgataattaccatagtttctatgatattctttttaaaatggataaatttaattccagtttgctgactttaaaaaaatacgtgaatggttgttgaatttaagtacttttctgcagctaccaagatgattatgattttcttctcttttttctgattatatggtttaatgtatacttttaaaaaatagtatacttaaacccattcatgtctactgtagtacttgtttttatgtttcctttcatgcatgagtcagttctgtacatatactctcttgctttaaacctgttatacatttaatcctgccatgtattatggttcttagctaagggattcctttggtagattagaagcattgcagactccccctactacctgtgttttatatgcagaagaaggagtgaaaaactgaaaactttccttggagcatttattttgacctagtttaatttttgtttcctggcttttgttatttgggattgtaagggaagaagaatggggctagggaaggactgtgagggtgataaacaggagctggagaataaaccagtgtatgatttccttcagcaccacctctgtccctccccttcccacgcttcctctttctctgtagttccagctttaccacaatcagcttgcccttgggcaagtcacttaaccacttatcttttcttttttttctttttggttatactttagtatgcaagcactgactgagcttttgtttctcatttggagttgaagaggatgactgcgaacagctgttacgacccaccacttaaggagaatggaaggattaaatgaacagtttataaagcctatgacactttaaaaaaatgagagtgattgttaggattagatttgtacaatggtattctatctttttttttttttttttgagatggtgtctcgctctgtcacccaggctggagtgcagtggcgcaatcttggctcactgcaacctccgcttcctgggttcaagtgattctcctgcctcagcctcccaagtagctgggattacaggcatgcgccatcatgcttggctaatttttgtattttcagtagagacagggtttcaccatgttggccaggctggtctcaaactcttgacctcaggtgatctgcccacctcggcctcccaaagtgttgggattacaggcgtgacccacggcacccggcctatatcttacatttcctaacagccctgaaaactccatgtggaagaaggatacttgtgaaacacncttggtacccaaactacaagaaactttctatagttacctctgtggcacaaggtctaaaacagaggttttattcacttgcttaaactttataacgtttctataaagtgttctgtgttaagcttgtcacttttggaatgaacaaccattgataggcatgcatcaaactaaaacaacatttgcaaaagcacttctctctagaatgatactactttagaatttctttaaattgcaaccaccctacttcatttaagggtttatttgttgatcataaactcctttccagagggccaggacatagagttacgatagctgatattctgcctggcacaaaggcaaaacatcaggggtgaataagtttaacaggattttattttgtacccaactttatgatctagctggtgtatgaagttaggtgtacctgttcctataactgaagagctttgggtaggtggttccctaagacatgttgttattttttagttcatgtattattaatagtacttggggtatatggtcttaagcattaatatgttgaggcatccttgggctcataccaccactatcttgtcaccctctgcttatttacctctaccttctgcaaggaactgggaatgttatgtggtgtggttttgattccatgccttttctctctgggctcctcctccacatgcatgagtgctataggccttgacttccacctatggttttgggagtgggtggatggattccacagaagggaggttttggtttgtaattcactattaacgtgatcactcacctgttcaggtttataggtcattatttctaaatcaggtctgactttaaatttgtgagagaccaatggaggtgagtaggaagcaaaaagcaaagtaaaatttcccaatctgctactatattgatcatgaaacactttaaagagagatgagaaagactgaaaggtcacctgaataaaagattctttgcagagtaaaatttactcttggtgtggaatttggaaatgaccttatatttggggatttgtttttgcaaacctgaaatttaggcctttacatgtcttagtccatgatcttgacctggagttcctgttgtagttcattagcaccacgcttcttgtttttccactgtattcctcatgctttttcctcattgtcaggcttcgctcacgaattcccttctactttgattgattgtccccttgccttttatttggtgtgcttctactccccctcctagacagggttactcccatagtgccccagggaaagttttgtcaccacacttaaaagataatgacctgggctgggtgtagtgtctcatgcctgtaatcccagcactttgggaggccaaggcggcagtctcttgcgcccaggagtttgaaagaccagcctggacaacatggcaaaaccccatctctacaaaaaaattacctagagactaggcacggtggcccatgcctgtagtcccagaactttgggaggccaaggcgggtggattgcttgaagccaggagttcgagaccagtctggccagcatggcgaaaccctgtctataaaacaaaacaaaaaattagctgggtacggtggtgagtgcctatagtcccagctactggggaggctgaggtgggaggatcacctgagcccgggatgttgaggctatagtgaaccaagattgtgcctgggtgacagagtgaaaccttgtctcaaaaagtagaaaaaaaagataatgacctgtttttatatctgacttcatcactagtctaggttccttcaaaacaagggctctggtgtactcatttttgtaaccatttgcatagtgtgatgcctggaccttaatagacttccttaagtgtttgtttggatgtggaggggaggctggacacaggactgggagttaagactgagtttgattataactttttgttgtatgatcttgggcaactgatttattaaactccttgaggttcagtttccttgtatgtaagatgaggggatctagcccacctggggatcttgttaaaatgcagattatggctcagtaggtctctggtgggttctgatattttgcatttttaacaagctcccaggagaagccagtgtagccagtccctgaactgcaaaggactagataacatctagtggctcttccagcttttatcttctgtgattatagtcattgttttaaattctgagcagaatgacaaaatatatgttgtaattactaaatatctctccagtttatcagagtgctgaaaagacagttctgtgccttatgaagtttccagtgtatgacaatgtccctagaattgaaagtaattttattgctcctaaaattttaactttaacaagttaaaaatataaatgtctgggaaagcatttgagttaacactagctcgtcatctaaattgtcagtatgcttgcttattggagaacatttgccataaataaaattactcttgaaggctttatgctaatgatctgaagtagatagacaggtgatcttatgagtataaatacagagacaggcaagctgttgatgaattcatcatcagaggaggaagagttcccagtcattgtcttcacttctccagaaggtgagaatcaaatcgttgtaggaagtgtttatagatatgctataggtaaacccagactttgtattgaataggattgccaggaataggttttgtttgaaaatgttgctactatttcttttgggttttacttcctcaagaagtcatgatatttgattagggagtattgccaccttggaaatttttagcttttcttgatcctttgtacactagtagttggactaatttttatgtgtgacttgtagaataaatctatctctttattctcaaccatatcaggaatattaatccagcacaacttcagcgtccaaataagttatatccatggctgtgatggattctgatcatttgcaaatagttcttactgggctggaactgttctgtctacctacatcctactctgtgttttacaatttaaattttttttgtctaaaaaaattaaaatccagataagggaagttgaaaccctgaaaaaaagtacagagtgtagcttatagttgaggtggttatctttatatagagtttttaacctcccacatagtaagttaatttatacttccaaagtgagctatatttcatctcccctctacacagttgtggtttggacagaagttttagaccatcatcatcatcatcattattacatttcagtcatttgtaatttttggttacctaagtcaaactcactaggtcaagcaccacagaggaaattgagtataactatcaccagaagaccaacctcttttctccctggagtagattcttgcctggggtaagttcaggcattctctttggtacacacggaggttcttattaacactgccgttttaacactgcccttcttgctgggtgtcttaatggaggctgccttgtggcttatttagtgttatgtcgctgctaagttggattcatttttaaaaatagtttaatttatattgaactcaaattaatgtttttgaaacaaactgtgtacacactgaaggcatttgctgcagtctaaacagattgtcctttgccaaatgtcttaaccagaactgttttttttttttttcttttgagacggagtctcgctctgttgcgcccaggctggagtgcagtggcatgatcttggctcactgcagcctctgcctcccgggttcaagcaattctgctgcctcagtctcccaaatagctgggattacaggcacccgccaccatgtccagctaatttcttgtatttttagtaaagatggggtttcaccatattgaccaggctggtctcagactcctgacctcagatgatctgcccgcctcagtctcccgaagtgctaggattacaggcgtgagtcactgtgcctggcctaggactgttatctgaggttccttgtacccctctttagagtctaaaatagaccatttcctgtcaccctgagaattattactattttaccgcaaacaccattttttagacttggcactcagatattttcatcgttctttgccattgaattttagtggcttatggctaatgagaaagaaaataatttttttttttctttgagacaggatctcactctgtcgccaggctggagtgcagtggcttgacctcagctcactgcaacctttgcctcccgggttgaagcgattctcttgcctcagcctcccaggtagctgggactacaggtgcacgccaccacacccatctaatttttgtatttttagtagagacagggtttcaccatgttggccaggatgatcttgatctcctgaccttgtgatccgcccgtctcagcctcccaaagtgctgagattacaggcgcgagccaccgtgcctggctgaaaataattgttaataatggcttttcagtttcaagttgcttttgaattttccaacagtgacctactaacatagccccaatatgttagtattatattttatgctttgtttttcaagaaatgatttttactataaataggagaccattagcactatctgttgtaaagtactatgtgatttttaaaaccagtattatacatttagtgtgatatgttgatctttaaaattccgtatctcctctcctctaaagaagatctatcagcactgtaagagagggcgagagaaaaaaaaaaaagatctaggggatctaggggacagtcttagtagcaacaaacccctttgatttatcaattgttatgcagattggaagaatagttataggtgatttcagagaggaaaatataatggtgaaagcaaactagattttttttcctctctcaatctctagagattttaacacagaaaaaacttatctaaaataattgtatgcctatttcttccccctcttacttacgtttaaatctagctgtcagtctttaaggaacagtcagatctgtttagttttgtcttgtaggtaagaagcagatgtgctcatagagggttatttttcctctgtagttccagatatgtttttggctttacttaattatatactggcagtatattaacctgccagtagtagcagtttcagtttttttttttttttgtctattaagcaatctccagtatagacaaaagttacatctaccctactctcaaaaaacatgcgtaccccagactctggaaagtcccttcactgcactaattgcaaccaacatccctacatgattctgtgtactgatagtcctttcccatcactgtaatctagcctttgtagagaagaaagaagactgtcagaggaagccctttgnaagagaatttttctgacatttctgttaagattgccagacttttcctgctctggcattcagctcttcagcaggttacaaaaatacttggggtccttccaactttttgtttgtttgttttatgtccttgttattgctgccgtcataggacagcaccggtctcttattttatattagaactttacaggattgttcctcattgggggttgttccctatgggagttgttccctatgttctgagcatgtgtatgtcagacctgcgagttccagatctaccctatctttcaatatcatcagtttgagcagtgtttgggctaacccagtaataattcttacacaacatctcacctcacttattctagcagatacctctgaaatagtgtgaaataaaactctattctaggtcggggcgtagtggctcacacttgtaatcctagcacattgggaggctgaggtggacagacggcttgagctcaggagttcaagaccagcatgggtaacaagttgaaatcccatctctacaaaaaatgcaaaaaattaactgggtgtggtgttgagtgcctgtggtcccagctgcttggggggactgagacaggaggatgaggtccacttgagcccaggaggttgaggcctgcagtgagccaaaatcacgctactgcatacaagcctcggtgacaaactgagaccctgtctcaaaaaaacaaaaacaaaaccagcaaaaaaaactctattctagttctgcatacaggccaacacatggtctaacccaccctatctcaaatccctatccatgtgctctttcagatacaaatatggctccatgaaaacaattttgttagcatttctcagaaagaatgaggggtaagagggaggaaaggaatgactgcaccctgtagagtggctataaaaggtttccttcagcatttagaaaaatctgatgatgtattatatgggtttacttgacgttattgtttgtccttaaatataaagtcacaaatcaacaattaaaaatctctttcttttcagtttccaaaaaaagacttacagcaaaatgaataatccagccatcaagagaataggaaatcacattaccaagtctcctgaagacaagcgagaatatcgagggctagagctggccaatggtatcaaagtacttcttatcagtgatcccaccacggataagtcatcagcagcacttgatgtgcacataggtacaattgaaaattgtgaattaagctttgttttgtttcattgacctaatgctgacatttattagaactttccatacgtgtttaaatactcaatagttaccggttccatgtaccttattttataccagaaccctcgtaaagctattggtaaactgcagttgtttcagtcaaataatcttacattttctaaggacatcttgttaggttcccacctaaggtgacctagcagcaaaaattcattgccattctttacagtaacagttatgatttttttttttaccgtggtacatttaatataacattcctttttctttttctttttttttttttgagacagagtttactctgtcgccaggctggagtgcagtggcgcaatctcggctcactgcaacctctgcctcctgggttcaagcaattcacctgcctcagcctcctgagtagctgggactacaggcatgggcctccatgcccagctaatttttgtatttttattagagatggggtttcaccatgttggccaggatggtctcgatctcttgaccttgtgatctgcctgccttggcctcccaaagtgctgggattacaggcgtgagccaccgtgcctggcctaataccatatttcataggttcttgtgtgcacatttcttttttctttttttttttttctgagtgggagttttgctcttgttgcccaggctggagtgcaatggtgtgatctcggctcactgcaacctccacctcccgggttcaagcaattctcctacctcagcctcccaagtagctgggattacaggcgcgtgccaccacgcccgcctaattctgtatttttagtagagatggggtttctccatgttggtcaggctggtcttgaactcctgacctcaggtgatctgcccgcctcggcctcccaaagtgcagggattacaggcgtgagccactgctcccagccttgtgtgcacatttcttttttttttttttttttgagacggagtttcactgttgtcgtccgggctggagtgcagtggtgtgatctcggctgactgcagcctccacctcccaggttcaagcaatcttcctgcctcaccctcctgagtagctgggattacaggcgtccaccatcatgcccagttaatttgggtatttttagtagagatgaggtttcaccacgttggccaggctggtctcgaactcctgacctcaggtgatccacccgcctcagcctcccaaagtgttgggattataggcgagagccaccatgccctgccatgggcacatttcttacacatttaatgttgctttaatcaggttgcttctttttttttttttctctgagacagagtctcactctgttgccgaggctggagtgcagtggcgcaatctccgctcactgcagcccccaccttcaaggttcaagcaattttcctacctcagcctccctagtagctgggattataggcgcccgccaccacgcccagctaatttttgtatttttattagagacgaggttttgccatgtaggccaggctgatctcaaactcccgacctcagatgatctacccacctcgtcctcccaaagtgctgggattacgggtgtgggccactgtgcctggccgagttgctttttatgtatgtgtacagttagtgggacagtgtttctttttgtcctctttgaaaaacttttaactcagtgtcattttagaactgaagaaataaggtaatattgaacaaataactactgcctaccataatgccttagactaccagggtgatttgcatatgtcatctaatttgtactcacacagccctgtaagatgggtatatattgaagcgattgagtcaagataggtacagtattgtgcttaccgtttcacagccagtagagtggtaacccccaaacgcatgctgttaacactgtgctgtatagtctcctgcaatgaaatcatgacaagaaaattctagctcttgctgggtgtggtggctcaagcctataatcccagcactttgggaggccgaggctggcggatcacgaggtcaggagatcgagaccatcctggctaacacggtgaaaccccgcctctaataaaaatacaaagaattagctgggcgcggtggtgggcgcctgtagtcccagctactcaggaggctgaggcaggagaatggcgtgaacccaggaggcggagcttgcagtgagccaagatctcgccactgcactccagcctgggcgacagagcaagactccgtctcaaaaataaataaataaataaataaaaagaaaattttacctcttaaaactgtgaatccagctctttcttcctctccggcatgtggggaaactaatgttcagagacactaagtaacctgcctgaggttaccaactaattagcgtcaagagcaggcactagaaaccagtcttctgactactgatttactttctaaataatatcattttaggtagcttgtgcttaactttctctgattatatagttggagttgtcatgctaacaagaactacaaatcacctgtacttactaactttcagcataggacaatgatttattatatacgtgttttctctttcaggttcattgtcggatcctccaaatattgctggcttaagtcatttttgtgaacatatgctttttttgggaacaaagaaataccctaaagaaaatgaatacagccagtttctcagtgagcatgcaggaagttcaaatgcctttactagtggagagcataccaattactattttgatgtttctcatgaacacctagaaggtgccctagacaggtaatgcagaataccctatgaattatccaactttgtgtacttancacattaataataataattattatttccacagagatggcttcataatttaacaaaaggtattttaaacagtgtttttccctgtgttttctgaaaaagaaaaaatgagtgatgtcatattttaaatgagccttcaggcctacaaaatattttattgaggtatagaattttcagcagccctttccattctaactggtgttacatataaagcatgtgatgaggactaacctgtgataatgtcattgatctcttttcagacatacttctgttccagaatgctaaaccttaaatattctctcctcgttcatttccttgcttctcaaggatgcttagtagatacagaacgttttgacctgctgtttcaaccgtggggatattttgaaagtgttttctggagcaagctccattaggccgatttaatttcttggtcaaccgtggggatattttgantgttttctggagcaagctccattaggatgatttaatttcttggtcaatttttttttttttttcagacggagtttcgcacttgtttcccaggctggaatgcaatggtgcagtcttggctcactgcaaccttcgccttccgggttcaagcaattcttctgcctcagcctcccgagtaattgggattacaggcatgtgccaccacgcctggctaattttgtatttttagtagagatggggtttcaccatgttggtcaggctggtctcgaactcctgacttcagttgatccacccacctcagcctcccagagtgctgggattacaggcatgagccactgcgcccagccttggtcagctttttttttttttttttggtcaattttttatacagctaacaatttctaatttttttgttgcatcagtgatttgattcattatttgactcaaataatggactacactctggtagtccaaagcattatggtaggcagtagttatttgtttatccttggtgaatatttatagttttctgtgatgccaaggtgtaattctgcaactttttggatctataatgaaatttggcagttttagtcactgtcggctttatttgcttacttttaataatagttattatattattgaaaaaacattatcaaggcaaggttatgggtttatgagatgtgctgggccaaagtagtctgtttcctacttattttattttatgtttcagtctttaggcagcagctttgaggtgtaatcatcgctaatatgtattcccagaagacttccattaattagttccctgggatcatacactgaatttcatctcttgctttacaaatgctgcagcagatgttcatataatagatctctgtatgatgggggatgtctgttacttggctcaaactaaaaatccacttgtataagaggatcatttaaaaaactttattatactgtgtcataacatgatcctttatctgggcctatccagctttggtatgtagctattagacatttttcccagcctggaagtattgaggtgggtaaaagatgttatgtgaccagaaatcatctgttttcatacatctttgattatagactccagatagatagagtttccccttgtggtatatgtaaagtacttagcatagtatcatattttcttatgcacttaaagtaaataacaagtaatgataatggcttctgtgacagctggactgtgaggcgtagtaactgagatgtttatggacccaagagttccttaggcccactgaataaagtagtcctattcagagcctctgctcttagcttcatctgaatcaagtcttattctataaaatgggatgtaaagtttcttaagaattactacaggaatcatgagttaaattcaacctgatatagaagagttaatttattagctgtaggtatcttaaagttaggtattattattaaggaatagcctcaagaaaggcatattggttacttatgttaaagttacataccatgttatttattgaatcactgcttattaaaattttatggactttttctcttatgatttcataaacgcccataatcatggcttagtcaaactatgtcatacctcaggttttttactgcattatgttntttcctactaattcaagtttgtttttctacataagaagaaagaaatattcaaattgagcctgttaaaagtaggtcacttgtttgtcctaaggtgcctgagtctaagtgaaattgcacctaaaactgtaaatttaagattggcctaaaaactatgacctgcctttttctttctttctctttttttttttttttggagcattagccacatgtaacaaagtttttatagacgtaccaaattaaaaatcttaaatagactgctattgtccataatctgccttttttggtgttaattttttaaattttcactgtttatcatctctggggtagatcaactcctctgcatttacctctgttcaacattagatttttcttctgttacatagcacttattttatactccttttttcttagtagcaatggtagttttgtttctgattctgcaaaatttacatttcctatctaataagttccaaaaatctttctaaaaggctattgttttaaaatgacatctttcaagttttaattatgtttcgtacccttaggtttgcacagttttttctgtgccccttgttcgatgaaagttgcaaagacagagaggtgaatgcagttgattcagaacatgagaagaatgtgatgaatgatgcctggagactctttcaattggaaaaagctacagggaatcctaaacaccccttcagtaaatttgggacaggtttgtcaacagctgctttccttgacctcatttaaacccatggccactgcatagtattatattttatgtatatataaaatatatttatgtatatatttatgtatataacccatggcatatacagttcatggcatattttacaattcaggatagatttcaaaattccacatttctacttacatcctgttcaaatagggttctaaacgtttaaggagcagagcagttagagttgtgaatagatattaaccagcattccatatggagaagataatagattcttttattccaaagcctaccttccaaagtacttttttttgtaaaggctcactgtagtattgttgaatccacttgtcctcattgcctctacttctgctaatccagatgcatagcgtctgctatggggttagctctgtgggagataggacactgtagaagacacacaagatcccagctcttaaagtgctacaatctcctagagggagataagaaatggggataacaggaagtagaataagataaacgtggagactcttgactttataattgtacctttttcttcaatttttcattaaaaaagtacttgtttaaatatttaaacagtacaaaagcatttagagtaaaaataaaagcagaaacacaaagtctgtctattctttatctattcctgccagtcatgctcaccagaggtaatcattgttaacagattgctatacttttaaaatactgttttgggtattataaaagtacataagaataatgataatatattatttaatgtacttagaaatttatgcttaaaaattcacttctctattatgagaacatgcttattttataaattagttttgggaactttttaaaaccataaagacaactttctttaagtttggatatcatcctaatgtatccaacagcagtcagagaaattagcatagctttacagaattaggagttttcaaaaattatactttgaagcagtgatattatattctttagaaccgtggtacttggcactcaatattaacataattgccaagatgaatagtgtggttcttagaatgtctacataatgctgaattttttaaaaagtgatttttgtggagaacatcagtatacatggtatgtcaagaatggaatgtgagttttaaaaaacaaatatcaggccaggcatggtggctcatgcctgtaactgcaacactttagaagaccaaggtgggaggatttcttgagttcaggagtttgagaccagcctgggcaacatagtgagacactatctttacaagaaaataaaataattagccaggcatggtggtgtgtgcctgtagtccaagctacctgggaggctgaggatggcttgagccagtgagttcaactgcagtgagccacaattgagtcactgcactccagcctgggtgatagtaagaccctgtctcaaaaaaaaaacaacaactttttttttgttttttcaaaagcattacattcaaatggttatttatttatttatttatttatttatttattgagacggagtctggctcttatcacccaggctggaatgcagtggcctgatttcagctcgctacaacctctgcctcctaggttccagcaattctcctgcctcagcctcctgagtacctgggattacaggcgcccgccaccatgcccggctaatttgtgtacttttagtagaggcggggtttctccatgttggtcaggctggtctcaaaatcctgatctcaggtgatccgcctgcctcggccttccaaagtgctgggattacaggcgtgagccactgcgcctggcgattatttaaagtagtccttttggtatgttagatacttacacaaacaatgctgctattttgcagaatatgttggagctcctctttgggagttgcctttttttaaatagcttcactggtgacaaattataatcagcataatcagaaagcagttacacattttccagaaataaatccagtgaataaggtgagtagtgttacttctggtcacaaacaaggaacatttttttttcctgtagaggtggggtctcactatgttgaccaggctggtcttgaacgcctggcctcaagtattcttcctgcctcgcctcccaaagtgctgagattacaggcatgagccaccatgcctggccacaagaacaatcttaaaatattctatagaagggtttcaggaatgatgggcaaagagatacattgcatggcatatccatatgggtgaagtttcagggcatatttctttttatagcctgaaaagctaggcagttagcaaagtacaaggtaatataaacagctgagaaacaagtgagccagactcaatacacagtacagaaaatgtgatataagtaatgcaaatgtcaagttaccttctgattttagaattataaacttacgttgaattttttggagtagaagttctgtgtatttttaaggtcacaggtacatttgaaaatttgatgacagttgtatgcccttatctcagatattatgcatattgaaaactttgcaaaagtgatcgttgcagtaggttccttgtcagaaattcatgctaatttatgtagattgctttggcctcagatgtttttgtgagtgtgggccactttgttcatcaggggattttttgttttgttttgtttttttgttttgttttttttgagacagtcttgctctgtcgtccaggctggagtgcagtatggtgatcttggctcactgcaacctctgcctctcaggttcaagcgattctcctgcctcagccttctgagtagctgggattacgggcacccaccaccatgcccagctaatttttgtatttttagtagagatggggtttcaccatgttagccaggctggtctcgaactcctgacctcaagtgatctgcccgcctcagccttccaaagtgctgggattacaggcatgagccatcacgcctggtctcatcaagggattttgatttaaaataataataccagaaaaaggtgtgtatttttgaatgaataaaaaccacacattgtattatctgttttaagaaaactttacagtaagatgtttgtccctaacagtcggttttcatgctcagaaatagtatagattagtggctttcaaactcttttttgtatacaactcatagtaagaagcacattttatttagcaattcagagtacatatatgtgtttgtgtaagcagctgaaacaaaattttgtcaaacactatcttacatcatgggatgtagtctggcactttcccttatattctgtttttttttttttctagagaaactctgatctgctaatactttaaatgcatttaattacaatataatgggtcctgacccacagttttagtagtccaaagtgatagacagtagactctgagcattggataaaacacagcactcatccatgaacaaaaataaaccacaacaataaaaaactttcaagctgattaaaagctattgtcaaacttcatgattaatggaggtttcaaaggatttctgttgaaaaaataaggatgcccactatcacttttgtttggctatacttacaggtattaatcattacaataaatcaagggggaaaatgtgattataagagatggaaaggaagcacaacaaaacctatttccttatttccatatgataggattgcctccataaaaatactgaagaaaatcttcagatcagtcattaaaaataattcagcaaggttgccagaaagaagacaaacacactaaaattgcgttctttggagtacagtggcgtgaccttggctcactgccacctccgcctcccaggttcaaacgattcccctgtctcagctccccaagtagttgggattacaggcacgtgccaccacgcccagctaattttttgtatttttagtagagatggggtttcaccatgttagtcagcatggtctcgatctcccagcctcgtgatccacccgccttggcctctcaaagtgttaggattacaggcattagccaccgtgcccggccatgttcttgtatcaataatcaattacaggaaaatgctggggtaaaaattatttcatttgcaatatttaacaaagctgtaaaatattcagaaataaatccaatgaaagagttgcaagaaatatgtaatggatataaaagaatgcctaaatggggaggtatatcatgcacatggatggttaaactctatataacataaatgtaaatatgccccaaatttctctaaattcaatgcagtgccagttgaaagtcctgtaagtttttttttaggaattgtataatctcattataaaattaataagagagtaaaaggccaagaatagctaagataattttgaggaacaaggaaagctacttctaccaggtaccaagacttattataaagttctagttgttacagtagtagaattgaagcaggggtgcatgaagatacaagtagaacagattataggccctggaaacatccacaaacatatggaaacttgatataaggcagaggtacattacaaatgaaaaaaatatagttctttcttaggactttatgtagactttctatagactacagacatgtgccactgagtctggttcgctacaacttttaaaagaaaatatatgagaattttttttatcttcagatagaggaaatgttcttaaacacacagaaaaacccatgaagatagagatgaaccataggtttagagataaacttgacctcattgaaatttaaaatccttgttcaaaagagacacaaaaagctagatgtggtggtatgcacctgtaatcgcagcttctcaggaggctgaggcaggaggatggtttgcacccagaagttcaagaccagtctaggcaacatagtgagaccctgtccttttttttttttttttttttttttgagacagggcctcaccctgttgcccaggctggaatgcagtggtgcaatcttggcactctgtaacctcctcctcctgggctcaaatgatcctcctaccccagcctcccaagtagctgagactacacgcacacactaccacactcagctaattatttaatcttttgtagagatagggtctccctatgttgcccaagctggtctcaaactcctaggctcaagtgatcctcctgcctcagcttcccaaagtgctagggttacaggcatgaaccatcatgcccagcctcttaacttctctaagccccagttcctttccacatcaggttgatgccaatattaaatgagattgtgcatatgaagcccataataatgttaaataaatcatattaatagtataatacctgattggtagctgtgaaaggacagtaggattctgaaaaagtccttgtcttgattccatatagattttaggatttttttttctatttctgtgaagaatatcattggtattttgataggggttgcattgaatctgtagatagctttggatagtatggacattttaacaatattagttcttccagtccatgaacacaggatgtctttcctttttgtgtatgccctccttaatttctcttattagtattttatagttttcattgtagagatcttttactttactttttttttttttttgagacggagtcccgctctttctcccaggctggagtgcagtggcgccatctcagctcactgcaacctccacctcctaggttcaagtaattctgcctcagcctcccaagtagatgggattacaggcttgcaccacaacgcccagctgatttttgtatttttagtggagatgaagtttcgcatgttggccaggctggtctcaaactcctgagctcgagtgatctgcccaccttggcctcccaaagttctgggattagaggtgtgagccactgcgcccagcctgagatcttttacttttttggttcagtttgttcttagagggcttttttgttgtgtgtttgttttttgttttttgtagctattataaatgggattgctttcttggttttttttttttttttttcagattgttcactgttggcatatagaaatgctactgattttgatatgctgacttttgtatcctgcaactttactgaattcatttatcagttctaacaggtgtttttgatagagtcttcaggtttttctaaatataagattatgttgtctacgaacaatgacagtttgacttctttccattttggatgccctttatgtcttgtctaatggctctggctaggacttccagtgctatgctgtataaagtggtaaaagtggggatgcttgtcttcttcagatcttagagcaaaggctttcactttttcgctgttccatatgatgttagctctgagtttgtcatatacagcctttattgttttgacatatgttccttctctacccagtgtgttgagaacgtttatcatgaagtgatgttgaattttattgaatgcctttttcagcttatggtgtttgtccttgattctgttactgtgatgtatcatgtttttgttttattttgttttgagacagtctcactctgttgcccaggctggagggcaatggtgcaatctcggcttactgcaacctctgcctcccgggttcaagtgattctcttgcctcagcctccccagtagctgggattacaggcacacgcctggctaatttttgtatttttagtagagactgtgttttgccatgttggcaaggctggtcttgaactcctgatctcaagtgatccacccacctcggcctcccaaagtgctgggattacaggcatgagccattacacctgaccctgtgatgtatcatgtttattgatttgtatatatttgtatatatttttgtttgtttgtttgtttgagatggagtctcactctttcgcccaggctggagtacagtggtgccatctcggctcactgcaacttccgtgttcaagcaattctcctgcctcagcctttcaagaagctgggattgcagcgcccattaccacatctggttaatttttgtatttttagtagagacggggttttgctatattggccaggctgatctcaaacttctgacctcaggtgatccacccacctcggcctctcaaagtgctgggattacaggcgtgagccactgtgcccagcctgatttgtttatgttgaaccatctttgcatccctgagatgaatcccacttgatcatgttgaatgatatatattattatatataaaatatatatataatataaaatatattataatataatatatattatatattatataaaatatattataatataatatatattatatattatataaaatatataatatataaaatatattatataaaatatattatatataatataatatatattatatattatataaaatatattatatataatatatattataatataaaatatattatatataatataatatatataataatatattatatatatttttttgagatagagtctcactctgtcaccaaggctggagtgcagtggcacaatctcagcttaccgtaacctccacttcccgggttcaagcagttctgcctcagcctcccaagtagctgggattacatgcctgccaccatgcccagctaatttgtgaattgaatgatatttttaatatgttattgaatttagttggtatccactttcactttttctcttcattattcacatatgcctttagtttcatagttcctgataaactagaaaccatttttctgccctattttgtttttttgtttgcctctcaatggaattaaagtaggagcagttgaatgtttacaagcaggtttagaatagtaaaaggaaaaacttagttctggttattccttactgatctgtttctccaaacataactctaccgacactgtgggagcaactgggtttattcagctgggagggaaataaaagaaggaggtcaaagagtgagtgggaacaacaaaacaggtactccttcatgtataggtagaatgaaaggcacagttgaagacaagaatatagagggtggagctgtattttaggtgtgcgtgacttttttttttttttttttttaagactgagtcttactcttgtcgcccatgctgaagtgacatggcatgatcttggctcactgcaacctccgcctcctaggtttaagtggttatcatgtctcagccacccaagttgctgggattataggcacataccacaatgcctaactaatttttttttttttttttttaagtagagaccatgttggccaggctggtctcgaattcctgacctcaggtcatttgcctgccttggcctcccagagtgctaggattatggtgtgagccactgtgcccagcaagtgaaaagaaagaaaatttctttcttttcttttctttctttgagacagggtttccttctgtcattcagactggagtgcggtcgcatgatctcggctcactacagcttccatctcctgggttcaaacgattctcctgcctcagcctctgaagtagctgggattaaaggcaggtgccatcacacctggctagtttttgtatttttagtagagacagggtttcaccatgtcgcccaggctagtctcgaacttctgagctcaggtcatctgcctgactccgctgctatttactctagtatgcttattccaagttcataggattataaatataaatgagcccaaattttctctctctcagttaataagtaatttttttagtccccctacatgtaaagtgcattagaaaatgcaaagaagtgtaactagtgtcattgcactcaaggtgctgaaagtttagttggggaagcaaggcaaacccaggatttcactgagtgtaattttagctttgattttccaggatcatcatctctccattttcttcctcctttttcttgctaatttttattgagtgctatgctaagcactttacgtggattatttaatttctaataattctcacagtaaccccagtaggtagatgctcatatttccatcttacatgagtagattaagacttaagataattaaattgccttgggtccctcagcttttaagtgctggagtcaggatctgtgcccagatttggagcttttaaacactattctattttgcatgttttagtgttgcccagaatttatttctccaggatcttagcggagatgcagtttcacttctcctgaagtatagataagatttccttaagcagaaggaagagccattcaaggggaaaaagaaaaggaactaatatttgttgtatttgactaatgttttagtcttgcagggagtacagagaggagagagatagggtggtagtggaactatctgtataggttatggaattcaattatcaagtcagtctgaactcaaagcctatgttcttcatgatagtaattaagttgacccccaaaaccatgacatgaagaaaagaccaaggagtgagcctggtttcttttggagaacatgagttaggatagtttgagtataacaaaggatgcttttgcatagagaagtaggaaggaatagaatagaaaaagagaacccaataaaattgtggaatatgaaccagagggtagttcagtgactcctgatcctgtggtaaacataataacacaccaaatcagactctaatacaagttcaattacttttttctctcttccctcccacccttatttcctcttttcttcccttcaccattttttttttgtgaagaatttaaaacatacacaaaagaacacaaaatactataatgaccctatgtgtgcatcaccctgcccctggccaattctgtacaatccacatttccattcacccttttgtattattttgaagagattctagatatcattttgctcataaatatttcagtatatatctctaaaacatagcaattcatttttaaaaacataaaaataccattattgttaccattattatcaaatatccagttagtgttcaaatttctagtgttcttataaaaatcattatttttaaagtttatttgaatcagagtccaaataagtattacatattagtgattgtttgatatgtctttcattattattattattattattttaatttttgtagagacaggatctcactatgttgtccaggcttgtcttgaaatcctagtttcaagcgattctcccaccttgaccacccaaagtgctaggaccccaaagtgagtcacccaaagtgagccaccactccagtctgatatgtcttttaagtctctttttagtttaagagttcatccttcatctcttcctctactccttcccctcactcccctcttggaatttatttattgaataatcaggttgtttgttttatcgaacttctcatagcctagatttttttttttttactgcacccctaacaatgtagtttaacaagttcctctgtcttctgtatttctacaaattggcagttggatatagaggcttgatcaaatttgtgtttgactttttgacaagacatcttcataggtggtgatgtatttttccattgggcatacaatgtctggtcatttatgatgttgcaaatattgattctcagtgcatcacctccctaattttggtttttctaatgctaattctattattccatctcttttgattaacttgagtactgctgtaaaatctccttttctactatttggctagtcagtggtacagttactgtgggaaaggcaggataaatgcttttattccattccatttatttaccaattttcaaaataatgaattggttcgtcagcatccttcagggtgactaatttgttttttgagtatcacatagactcatggatgtaaaaacatttcatatattttagtccatgtaatcatttattgttcccttagcttttccatggattttgttactatcttttttctcgttactgggatatgtgtctgtggaaaactagaaatttactgaaaacaagagctggaccaatcaagtgtaggagtgttttctgatggcatttaagaggttttcacttaaagtccccttttataactcatatcttgtacttgcatatacttactcagctgcagaggaattgtcggtttaaattttgtgggaaaattcacatatatcaaaaggctttagtctctcacttccaggatttttagaagattgctatagcaagaagaaagggctttttaaaaagtttataataattccaagtaactagctataggtatgttagcctaactttcaggatcttgggttttcagagaacatataaaattataatgggttataactatcaagttgacctttccctgagaacatactattggagaaacctgtggtttctaagacgtttctaaaacttaaaactcattccttcccagtataagaaatatattgctggcttcagaattttccaggaaaataaattttattcccttgaaaatcagtattcatatacattagtgctgagtttgtaagctttatttgttctaaacagaatttaaaatagttgttaaaatgaaaatataaagtagcacttactggattttacaatttaccaacccctcttcgcatccattattacatttcttaggcttcacaaaaccccatgttaatattcagtaattattgtctgatagatgctatgctgagccttaacatggattatttatttatttatgagatggagtcttgctctgtcacccaggctggagtgcagtggcttgatttcggcttactgcaacctccacctcccaggttcaagcgattctcctgcctcggcctccccgagtagctgggactacaggtgaccaccaccatgcctggctaatttttgtatttttagtaggacggggttttgccatgttggccaggctggtctcaagctcctgacctcaggtgatccgcctgcctcagcctcctaaagtgttgtgattacaggtgtcagccaccgcgcctggcagattatttatattttaattctcacagcaatcctgtgaggttggtcctcttattatgcccatttatgaataagtaaactgaggcgtaagagaggttaagaaacctgcctgtgtctcacagctaggaaatgaaggagagtcagggattgagcctttccttgcttttagcacctggacatatatccatattatccctattttacagatgaaataaatgaccccttggagatatttggagacttttccaaggttgcttaattagcacatgatggagtcaggacaagaatccctgaattcctaaatgccaaggcagtgttctctcctagcaggcgtagagtggaagggtcacagtaggtgagcaaccctgctcctccattcactgctggagctcacctggatgcaacagagccagaaaggtaggattcaagattttagtacaagtagcagcattttaatttgacataaatgacccagctgaatgagcacaaaattaggacagtatgtgtctagagactgaattggtatttattatcccagccttattcacgttgttctccatacatggtttcttaggtgttggggggcagtcatctggaccatttactcagcttctagccacaatttctatttttttctctggggagtacatctttttgtataatgattcactcagaagccaagagtccttcctacaattcaaattgtaacagcagtagctactgtttgttgtttattttccgttgtttatttattaagtattatgttaaatacttcagtatttttacagatttatgatgtagttgtcatacaaagaggtaggtacacagacatttgccagatcattctctgtcacactgcttaaagaaagagaacgttacaaatgcactttgagcatccggtgtacacttcagttgcattttccttcctgctcctgagagataaccactatcttctttaatgattatcatttccgtgtttatagttttatatgtttttaggtttcatggaaatagtattttattgtgtgtaatctctgccgcttgtattttttcattcaacattttgttttgtaagagttgtccatattgatgagtattcctctgataatttttgtattttattgctctttgaaaaattcattgaatgactgtaccactatttattcattttcctgttaatgaaacagtgttactatggaattgttgtacatgtctccttgtacacagacttctctggatacatatatccaggagtggaattactatgtagtaggatatggacatcttcagattgactaggttgtttcctgtagcggttgattcaagatgcactccatcaggcagtgtctgagttctcattctctgcatactaaacaacagttggtgtcgtaagactttaacatttttgttaagtaatagtcttatactttttttacgtgtatttttctcattatgtactgtaagtccactaatgtcagttgaggagattgagccacagagaagtaaagtaacttgttcaaggccatgcagtcagaagatatctggccccaggagaatcaattgaatcttggaggtggaggttgcagtgagccgagatggcagtgtaaagcactaaggagcttaagcaaaactccctctagaactgtggcttttagaatcttcatttagtagaaaagaaaggcttcatcaatactcaaatttcaccttgatacgagagaacttcaaacattctccagcaaaaggcctttttttttccctaaggagttaggactatgggtatgcacctaagagcatctggacccctcaggtagagtgagagaatagagaatgtctcaggacctctctgggcagtaaagcagaactaggtcttatttatttatttatattattttatttatctatcaatcaatcagacagagtctcactctgtcacccaggctggagtgcagtggtgtgatcttggctcactgcagtctctgcctcctggtttcaagtgattctcatgcctcagcctcctgagtagctgggatgataggcatgccaccatgcttgccaggctggtcttgaactcctggcctcaagtgatgcacctgccttggcctcccaaagtgctgggattacaggcatgatccactgtgcccagcttgaactggtcattagtgagaaaatgagagaactaattaagaacctggaaccaacctgggtaacatagaccctggttctaccaaaaaaaataaaaataattaaaaaaatagctggacgtgatggtaaatgcttgtggtcccagctactctggaggctgaggtagaaggactgcttgagcccaggagatcgaggctgcagtgagctgtgattacaccactgcagtctagcctgggcaacagagtaagaccctatcttaaacaaaaacaagaacaacctggaaacttgggtgataggctacttctagtgagtatgaatgcatatgattactttgtgactaggaaaaggttaatgagttaaggttaaggttacttgctaggctgtttcttgcacattctgtcttcactggatctgttaagcattctgggacaggaatcttagtactgtgcagcactactgagctaaagactgagtttgagagcgccatctggtggctttctgtagacatccaatttcatgaaagagggactttcccagtgcccctatatcagatattataaaaacacaagaaaaaaaaattaaaccacttcaagaacatactctaccatagttttatctctgcagaagaaagacaggatctcacttagtagtgtaagtagaaccaataataaaagttattatgccaggatcttaggatatttccagtcaagatgccattttggagagacaccgatcattggaatttcatctcccagtccctaatttgcaaggtattatttagagaatttgactatttgtttttgacttacatattttaccctacttgaattagttattaagatttcatgagagctgttagtggtacactacatacatcgctggagagttataaaaatagcattgcatcctttttttaaccagtctagatcacatctatgagaattcacatcacaaatttaatggtttggcccaaaatagtaaatttctttccacaagtaacttggcaagttctaaaaaaatccctcagtgactctgttcaattaattatggagtacatagggaattgaaaattaaaataagcatgaatggaggccatgtggatcttattttgtcttttaagcactcataatacctactatctcatagggattttaagaagtggagatatagatacagatatagacatatttttttgagacagagtctcactctgttgcccaggagtgcagtggtacaatcttggctcaatgcaacctctgcctcctgggttcaagtgattctcatccctcagcctcccgagtagccgagactacaggtgcccaccaccatgcctggctaatttttgtatttttaatagagaggggttttcaccacgttggccaggctggtcttgaactcctcacctcaggtgatccacccatcttggcctcccaaagtgctgggattacagatgtgagccactgagcccagccaagaagtataatttttttttttttttgagacggagtttccgtcttgttgcccaggctagagtgcaatggcacaatcttgactcggcgtgatttcggctcaccgcaacttctgcctcctgggttcaagtgattctcctgcctcaacctcccaagtagctgggattacaggcatgtgccaccacgcctggctaattttgtatttttagtagagacggtgtttctccatgtttgtcaggctggtcttgaactcctgacctcaggtgatctgcctgcctcggcctcccaaagtgcttggattataggcgtcacagtggccggctcgaccgtgcacatnnnnnnnnnnnnnnnnnnnnnnnnnnnnnnnnnnnnnnnnnnnnnnnnnnnnnnnnnnnnnnnnnnnnnnnnnnnnnnnnnnnnnnnnnnnnnnnnnnnnttggtggctcaagcctgtaatcccagcattttgggaggccgaggcaggcagatcacctgaggtcgggagttggagaccagcctgaccaacatggagaaaccccatctctactaaaaatacaaaattagccgggcgtggtggcgcatgcctgtaatccagctactagagaggcagaggcatgagaatcacttgaacccaggaggcggaggttggggtgagccgagatcacgccattgcactccagcctgagcaataaaagcgaaattccgtctcaaaaaaaaaaaaaaaaaaggccgggtgcgcggttgctcatgcctgtaatcccagcactttgggaggctgaggcgggcggatcacgaggtcaggagatcgagaccagcctggctaacacagtgaaaccccatctctactaaaaatacaaaaaattagccaggtgtcgtggtgggcgcctgtagtcccagctacttgggaggctgaggcaggagaatggcgtgaacccgggaggcggagcttgcagtgagccgagatcacaccaccgcactccagcctgggcaacagagcaagactccgtctcaaaaaaaaaaaaaaaagacacttttaattccgtagagacgactatagtttaaaatgttgctggtttgtactctattatcctgtttattcacttaacattcaaataaatttgagttattctgtgtattagaactttatttttaaagttcatcttaagcaatatcagtgataattacaaaactttaaaagtccacatattttgctttttctaagaaatcccttttctncccttccaggtaacaaatatactctggagactagaccaaaccaagaaggcattgatgtaagacaagagctactgaaattccattctgcttactattcatccaacttaatggctgtttgtgttttaggtcgaggtaagaacccttacaattttttatagaattggataatataagtttttaatgttggctttttcacagtgttagaagatggatataagatagagctgcttatttgctcagcatcttttgaaaatgatctacttgttagagaatacataggtggggatttttatgtttaaatcattgtgttcccaaaagaagtttaagtggagatctgaaaaaaaatacaaattactacagtaataggtgctctaagcatataaaagcaaggcaagcccagcctgggcaacatagtaagatcctgtctctaccaaaaaaaatttttttaaattagtgggatgtggtagtctgcacctgtagtcctagctgctagggaggctgaagatcgcttgagcccaggagttaaaggctgcagttaaaggctgtgatcaccacaccactgcactccagcctgggtggcagagagagatctcatattaaaaaaaaacacacaaaaaggacaaagattggcagatttgaccttataacaattcaaaaaactggaaaaaaaaaaagcagatgatgataaacttgggaaaccatttggaatgtaaacaatggtttgatttttaaaatgcagattaactactaacattgtttcctgctgttaaattatcacagttttgttttgaagtaatacccactgccgatggtgttgcttttttatattggtaatgatggtatcaattgctctagtctttctggagggcagtttaacagtatcagtcttaaaagtaaagatgcatttttacttttaaaaatgcaatctcaggaaataatcagagttcaaataggagatataaaaggatgtttctgtcagtatagtacatattagcgaaaatttagaaatctaaatgttaataggagattggctaaatactgattttataattgcaaatagaatatcttatagaaaaataacatttcctattctactttccatcttacctgctttttctttatagtattaatacctcaggtattaaatatttgtgtgtttttgttgtccaccctaccaaagtgtaaattacttgagaatagaaactttgttttgttcactgctttatcctcagtacctgggctcgtgcttggcacatcataggtaaatatatattgaatgaataaacagttttatgacagcattttaataccatgggaagatattcttaatatattctcatatatatgaatatatgttcttatatgtgcatatataactaaacatttttaattaatatatgtatattatatataagaatataatttttaaaatgttcttaatatattaaagagaaaacaaaagctgtttacaaaaacatgtgctatatggtcccattttgggatttattaaaaattccaagacatatcccccccacaaaatttttaaaaactctaatagggtccaggcacagtggctcacacctgtaattccagcacttcggaaggccgaggcaggtggatcacttgtggtcaggagtttgagaccagcccagccaacatggcgaaaccccatctctactaaaaatataaaaattaaccgggcatggtggcgggcacctgtaatcccagctagttgggaggctgaggcaggagaatcacttgaacctggggggtggaggctgcagtgagccaagattgtgccactgcactccagcctgggcaacagagtgagactccatctcaaaaaacaaacgacaacaaaaaacaccaaaaactctaatataccatatatggtgtaggtaaaagacaaaatggaaaagcatgtactagaaatttaataatgttgtatagtaattaagaactcacattctacagtccaacaacctggcttttcattccaaatataccacttacttagctgtgtggctatgagctaacaaacttacttaggtttttcaaacttcagttttcacatttgtaaagtggtgggtggtacattgtacctgttgtgaggtttaattgagataatacaaagtgtttagcaaggtgcatggcacatagcaaatgctccataaacagtagtagccactctagcacctttataatcatgaaattatggtaacttttgttaccataatttagcttttgtttctaagttttctgctattggcaaatgttacttttatagttagaaaataaactattttttaagttggtagcaagaaccagggtgtaaaatggattcagggagtgaggacagtaaaaaaaaagcatactctgtaatgctatgtgcttgcttcaggtaggtgggtttagaatgttaaaatatcacttgctgtttagaacccagtcctgggattaggtgccaaagctgggtgtttttttttttttttaatctatgttgtatttgagattaaacacatgatttcagtaaacatttaataggcaagtaacaatggcaatagatgaatcaaacctgatccctgtcctcagaatgttcttggtttagtggaaatgacagaataagaatctaaaaaataaagtgtctcaattctctgatccatacacatcactctcccattgtgactgacttcctgtgctgaaccagagagagatgtctttacagtatagaggtatgaggaggaaactggatctcttggaggattaaaagataatccactccttcttttgacgggaggagagaggaagagtaaccatgtggaaggatctctgtcacaagggaacaaaaagtttttctgttcttgcctggagctgtctccctagttgtggaagcactaattatctgaacacttgccacataggtaatcatcaagtacagacactgaggttgccaaaccttgatgatatgaaggtgagtgggactcagttccctgatgtctggggagctcacagtttagtggggtagacagactgtgcaatagtgtttagctcccttacctttaaaaagtgacactgtgaatttatgcttttagggtagaaatacgcaagaggaaagatacacctggtagaaccttgctcagggtgttgctgtcaccagtactgcaggcccacaaacctttattgactgctcaccttgtttcaagtcatatgtcccatctgcaaaaagatgtctctgacatctcttgctacaatattccttctccattcctaaattcacttgtcatataataggcagccactgatctgccttttatttggctctggacattttggagtccttcatacatgtcaaaaaaattgaggcaaaagtaggtatattttataaataaaatgcaaatgcctacacttaaaggcacaaaagagaattttacaccatataaaggcagctctcaaatagtcatttagtactctcgagaattcatggaaaagttccaaatgggtcatagaatatcaaggcaagaatcttatttgattcaaatgcttactgacagtaacaggttatgaatgtttataccatttataaataacctatttttgaggagacagaatcaagatgagaggttatcttgtttataaaaagacaggttttggccaggcatggtggctcacatctgtaattccagcactttgggaggctgaggtaggcagatcacttgagctcaggagtttgagaccagcctgggcaacatggtgaaaccctgtctctattaaaaatacaaaaaactaacagggtgtggtggcacacgcctgtaatcccagctactggggaggctgagacatgagaatcacttgaacctgggaggcagaggttgcagttagctgggattgtgccactgcactccagcctgtgcaacagagcaataccttgcttcaaaaaaaaaaaaaaaaagtttttttttttttttttaacactgctttctttttaggataatagtaatttgtacaaatggaaaaaatttaattccacacagaaaggtataaaataaaaagcaagctgttctttattccatcctatgactgctgtgccctcttctcaaagatctaactcatttcttgttatacttccaaaagtagaattttgctaatatcatatatatgatatatgtgatatatcatgtatgtgatatatatgtgatatatatcatatgtgtgatatgtatgtgctatatatcatatatgtgatatgtatgtgctatatatcatgtgagatgtatgtgctatatatcatatatgtgagatgtatgtgctatatttcatacatgtgagatgtatgtgatatatatcatatatgtgagatgtatgtgatatatatcatatatgtgagatgtatgtgatatatatcatatatgtgatatatatatacacacacacatataaaatgtgcattttggagtccttcatacgtgtcaaaaaactaaagtaaaaataggcgtcttttataaataaaatgcaaatacatttaaaggcacaaaagataattttataccatagaaggcaattctctgtctatgtataaggtgaacattatactctatctgctagtagttcagtatatatgcctgttgggaatcatagtcatttttccaaatgcaattattattgtttctaatatttgttttaattttattataatacttgtgaaataatattttgaataatatttgtgaataattttttaaagtagaaacagataggtgtgaggtgtaatcattttcacattttcctttcagtagtactgagacttttcaggagatcctaagattttaagcactccctgttggatgttatgattcgcttaagttctgttttccttgtctgttttcttgtagaatctttagatgacttgactaatctggtggtaaagttattttctgaagtagagaacaaaaatgttccattgccagaatttcctgaacaccctttccaagaagaacatcttaaagtaagtgcataaattttggtattttgtcttcttaatttatggacataatatatacctagtttaccatagaacaggtgaaaatttttggaggtttcattatttatgttgtgttttttttttttttttttggaaacagagtcttgcattgtcacccaggctggaatgcagtggtgcgatcatggctcactgaagcctcaacttccctggctgaattgatcctcccacctcagccttctgagtagttgggactacaagtacacactaccacacctggctaatttttgtatttttagtagacacagggtttcaccatgttgccttgactgatctcgaactcctgatctcaagtggcccacctgtctcagcctcccaaaatgctgggattacaggcgtgagccactgcacccagcccctatgtagtgttttttgtttgtttgtttctgtttttggtttttttgacatggagtctcactctgttgcccaggctggagtgcagcggcgcgatcgtggctccctgcaacctctgcttcccaggttcaagcaattcttctgcctcagcctcctgagtagctggaactataggtgcatgccactgtgcctggctaatttttgtatttttaatagaaatggggtttcaccatgttggccaggctgaggtcgaactcctgacctcaggtgatctgtctccctcagcctcccaaagtgcgaggattataggtgtgagccaccgcacccggcccccatgtggttttaaatatttgtcgggataataaaatcaatctcacatttattaggatcatgaatcaccaaaaacatatcaatatgttctggtctttacatgctaaaagtagttttggtagctgtagtcttaatagactgttgaagctgttaacctgtacctgaagataagcattcaaaaccattaatatttagctgcatggttcagggggtcaaacatggactatataccgactgtaatgaaattccactaggagagtgctgagtcatttatttctttgtggtcagtgtatcattttctgtggcaattgatttgctcttaaatttgggattctcccatgaaaatcattcttcatagtttagaaatattttcttcagtaggagtcgtatatagctaatctctgtgatttgttttctccagcaactttacaaaatagtacccattaaagatattaggaatctctatgtgacatttcccatacctgaccttcagaaatactacaaatcaaatcctggtcattatcttggtcatctcattgggcatgaaggtcctggaagtctgttatcagaacttaagtcaaagggtaagtctcctgggcagcatcttctgagtgtccaccacatcttttcactctggctctcattttctcctgaatagtgtcctatgnaggaacattgttagatgtgaccattttgggttagtgagtgagatggtggttgttggcacgctgttgncttttttttttttttttcttttttagatagagatggggtttcgccattttgcctaggctagtctcaaactcctggtctcaagcgatccgcccatcttggcctcctaaagtgctgggattagaggcatgagccaccgcgcccagccagtagtctactcttgactgggaattgatttgaggaatcttcaggaaagcccccacttctgcaccatcttaaactgcttttctgaactgatttttttttcccaatcttttcgcaagaggttcattctgatatcttaggaacatacagtatgaatttttaaaatttttcttatcttcaaggaagccacatatgcaatcaatcgtattgatttcctttgaatgttgcaggctgggttaatactcttgttggtgggcagaaggaaggagcccgaggttttatgttttttatcattaatgtggacttgaccgaggaaggattatgtaagtattgattcacctttttacttttgaatgaaaatttactttctatgatgttttttaacttcttcatgctgtggatctgttttatgttgaaagctacaacactttaattcatacaacttatccattgtatttttcatatgtaactnggcctttgtttcatggatgattcttccccccttaacaactgatcattatgttgcacttgttaaatgtggacttggctttttatttgctcatttactgccccaacaccctttctgtcacatatctctgagcccagagggccatgtatgtgggacacgtaaagccagtctcagggaggtgaggactgcattttctaagagggaccatcttccacttatctgactttaccttaggagtgagctcactgctttgaaggattcaaggactgaatggtttttaagtgtgccccttttttccagtacatgttgaagatataattttgcacatgtttcaatacattcagaagttacgtgcagaaggacctcaagaatgggttttccaagagtgcaaggtacttttgtttcaccaaaatttttcttaaggaatctgtttttcaagagcaaatacatgtgaattaatttaaatttaaggcccagttaaacttttaaagtttttttcctaactgaagtctaaaattttgcaatgtataatagtattagttaaggcttagttgtactagtctgatttgctacttggggcacaactaaggggaaaggcatcgtgtagccctttttaggatggaaaagggaagaaatcaaatgcttttccatcactcagaagaaaatcagcagtttcttgagctggaatatgtcagggattatgttactccctgcctgaagctgcatgagctctgtcgttttcagatctttaaatctgtagcaaactctcaaagaagtaatgaattgctttatgtatgattgtgttattaaaagtgattttattattgtatgtatgggaagaggctggcttttttttttgcgtaaaacaaatggtgtttgtctttcaaatttttaaaagccttttaaaaaagggtttttaaaaatacgtgctttaaagcctatcgagattctcaaatgtattttagtatgagaaacatcctttttaactagataaaagtttaaaggtataatctctgcttctgaaaattatgacaataactcctaatctgggtgctgttctctgaatgagtcaccaaaatcatctatggtggaattgttggatctcacaaggttctttcacacagtttttctaaattctttggctattagtttcaacaacttaggctatcgagccatatcctgtatttgttattttcattgaaagttgtttacctattttgcttttggttttaagcctagattgatggattaaattttatacacattaagaaatttttaaaatattctatacatttctaaatcaagcatagccattttttcagaaagtgtgataaagttaaatatggagtagaaagcttatagtgcaagccaaacacttaaaaaaaaaaaaaaaggtttctaaataagggtggccgtatctaattggattaactttctattttaggacttgaatgctgttgcttttaggtttaaagacaaagagaggccacggggctatacatctaagattgcaggaatattgcatgtaagtttgttgttattttactgtatacattgctgtgtggagtatttcagcaatcttgcatatattttcagtaataagtgaatgattacaattgaagctgaggtataaagctttcaactttgtagcaacagggcaaatgttgatgtcaggagatgtttaaaatcttaattttcatcatcgtgaaatttattttatgtaatatttttattaaatatgcattttgcttattggctttaaatatatttcagttctacagcatatcaggtgttacttatatgaaagctattgatcatttacttttttaaaatttccattgctaccatcctagtctgagctatcatcatttcttgcttgggctaccatgatagtcttttacctgcgatccctattttcctcttggtccccattgtagtttatttttccaggctcgtgatcttttgaaaactaaaatctgaatgtttcactcctctgtttaaattccttcagtggtttcccaacagagttggcataaaatgcaaaattttccttggcctacaaggtgatgtggccccagcctatctggccatcttctataccactgtccagcccacctctcccatttgcattccactccaactgtactggctctctaattttcaagcattaagtttattcctcccccattgctattttctctacatgaaacactgttctatctgatctttgcctggctaggttcttatcatttcagtctccactcagagttcttctcctcagaccttctctgacctcccaatctaaaataatgcccctgcccctttttttattgttttcatagcatctctcactaacattacaatatttgtttgttgtctgcctccctcccaattacaatgtctgtgtgcttcttggaggacaaaggatttcatgtgtcttacctacttttgtatccatagtgtgtggaacagtgtctggcacatagtagatgttcattaaatatttattagatgaatgaatcagtcagtgtgtctcagtatattggaagttgctcttaccaaaaagcatcttctgcattgtttttctacactggccaaaaatataagccatttttttttccacagccgcttcctaaatgtttgtctaatttgtttcatagaaatttaggaggaaattctgttcataaaaatgtgtgtactttatattttaaaaatcctgtaggtgtcagcattttaatatcgaattttcttcattaacaagtactcagtttttaaccagaaacattcgtggttttccccgaaagaaatgtgattttgctctctacaatggaagtatgtttggggattaacagtatatttggcagaatcatcaaacaatatgaaactgcttaacaatgtggtaggaaagagacaacgatttagggctacagaaaatttttccaatggagtaaaatttaactgaagagagaaagggtgtacagtaatgaatttaatgtgttacagatctgctttaataaactatgtagtagctttgtatattttatttatttatattttcctttttaaaagtattatcccctagaagaggtgctcacagcggaatatttactggaagaatttagacctgacttaatagagatggttctcgataaactcagaccagaaaatgtccggtgagtcaccatacagattttactattatacactaaattttcaataatgattagaatctgaaaaaatttgaaattgtgaataaaatgcttttaaacattttatcaagcattacaaaagtagagaatagtataatgaagcaacaccaagcttcaaccattgatacatggccagtcttttttaatctatacccatccctcttcagtcatcccccttccaccctaaattattttgaggcaatatctctaaaagatgaggacatttttaaaaacaaatataattttattatcataaataaaatagaataataacctgtcttaacctggctttattctaactcaaacgcccaaagtatcagcccacctatctgactcatataagcaaatgaaggcaccctctttttcttaagccacagtaaagattacaatctcagaatcctcctgattgaccagtggttaacctggaaatcaaaagtccaaactcttatagtagcagaggtattcttgctagaggaaagtagtccttaaagtgcttgtgagccaccacatgatattcctcccataaaactgaatttcatctatgttttctaaagtcaaatgatagagggaatataattgaatgacatgttttacatttttaatttttctcctctgttagggaagtatttttgaaattctactggcaatttggttattgagtaagttttttggaacagttgttttatgaataagatcaacaatgtgatagaactttttgtaaaaaaaaaaaaatctttttgggctgggcgcggtggctcctgcctgtaatcccagcactttgggaggccagggcgggcggatcagctgaggtcgggagttcgagaccagcctgaccaacatggagaaaccccgtctctaataaaaatacaaaattagccaggcatggtggcatgcatctgtaatcccagctactcgggaggctgcaacaggagaatcgcttgaacccaggaggtggaggttgctgtgagccgagatcatgncattgcactccagcctaggcaacaagagtgaaactccgtctcaaaaaaaaaaaaaaaagtctttttgacagaactatcctatcagaatcttttcctagttaccattgtttgaacttttccagacatattatcaaagcttcattagcgataattgcatatatatgacttgcactatactgtttaggttgagaacaataattaatgtcttctaatgttcaggtgggcttggcctatctattgtcactcctaggtggttggtggactcgggtgactttcttctaggaaatactattagccagattttacctgacntcatgctaggattcagctaaatattctattttttgggaagccaaggcagaggaggatcacttgagactaggagtttaagaccagcctgagcagcatagtgacaccctatctgtatttaaaaagttttaatgatttttttatattatgatacagtgtttggatgagtacagataattatctagcttcaagaacaattttttatagagatagggtctcactgtgttgcccaggtggatctcaaactcctggcctcaagcagtccggcttagccccacaaagtgctgggattacagccgtcgtgagccactgtgcccagtctagaattttcttttcttttttcttactgagcctagaatttttaaattggaataagataccatggttttgaggtttaaaaaatatattaagggtcaaaatttagaagtctttttcaatgaaaataacatgtgaaattatttagaaattaaatttctggtttgaggtacccagtaggttacaatgtttcctacgcagtttcttgccaatattttaagtccccatttattgcctaatccttaattactcaagaattgattatgatacagaaaatcttactgaaaaactagacaaagttactgacagctgtgaattcattagagattgctgagttgatcattctgcctttaacagcaaatgctctttttcaactctagataatttactgaggaattgaaaaacgaagaaatctttccttttccattcagtgaacaacagagaaagttgtagattaaatatttgtataacgtaatatgttaagttattcatgcctgacgtagtttagtgggggatggcgagatatagttcacataatttaaatggtttaaagtgatatatgcactgatacacataattgcatatgtagaaaatcctaaggaatctactttccccttcaaaaatctggaaccaataactgaattcagcacagtcacaggttgcaaggtcaacatacaaaaatcaactgcatatctatatatagcaacaaaaaaatagaaaattaaaagaagtatttataatagcaacaaaagcataatattactaggaatgagtttaaccaaagataagcaagacttctacataaaaaactaaaaacagtagaagagagcaaatattagccgagaaaaatgaaagaagacctaaataaatggagaagcatactatagtcatacattaggagacttgatattattaatatgttagttctctccaatctgattcatagactcaatgtaatcataaccaaaatcctggtaggctgtttttctttttctttttattcatttatttagagacagggtcttgcattgtcacccaggctggactgtagtggcgggatcatagctcactgcagccttgacctcttgggcttaagtgatctcctgcgtcagcttcctgagtagctgggattatgggtgcaagccactatacctgtttgtttattattatttttttttagatggagtttcattcttgtcacccaggctggaagtgcaatggtgcaatctcggcttactgcaacctccgcctcccaggttcaagcaattctcttacctcagcctcctgagtagctgggattacaggcacccgccaccacacctggctaatttttttatttttagtagagatggggtttcaccatgttgaccaggctggtctcgaactcctgacctcaggtgatccgcccacctcagcctcccaaagtgctgggattacaggcgtgagtcaccgttcccggccttttttcttttttctttttttttttagacggagtctcgctgtgtcaccaggctggagtgcagtggcgcaatctcggctcactgcaacctccacatcccaggatcaagctattctcctgcctcagcctccccagtagctgtaaccacaggcacgcgccaccatgcccagctaatttttgtatttttagtagagacagggtttcaccatgttggccaggatggtctcgatctcttgactttgtgatctgcctaccttggcttcccaaagtgctgggattacaggcgtgagccaatgcaccggctttttttttttttttttttttttttttttaatgacagagtcttgctctgttgcccgggctggagtgcactagtgtcatcttggctcactgcaacctcctcctcctgggtttaagcaattctcatgcctcagcctcccaagtaggtgggattacaggcatgtgccaccaatgcccagctaattttttaatttttttgtagagagagagtctcactatgttgcccagattagtctcgaactcctgagctcaaatgatcctcccacctcagcctcccaaagtgctgggattacaggcatgtgccactgcacctggccttttttttctttttttctttttcttttttttttttctgagacaggatctcactctgtcgcccaggctggagtgcagtggtgcgatctcagctcactgcaacctctgcctcccaggttcaagcggttctcttgcctcagcctcccaagtagctgggattacaggtgtatgccaccacgcccagctaatttttgtgttttcagtagagatggggtttcaccatgttggccaggctgtttttccttttttcagaaattggttccaaaatttatatggacatacaaaggacctagataagtcagaacactccggaaaaaaaaaaaaatcaccaaatgtgggaggaattaaaccactagatttgaggacattagtataaagcttcagtaattaagacacggtagtattgacatcatatggatagacaaagaaatcattggaagagaacagagtccagatatagttccacacatacatggtcagttgatttttttgttgtgattaaaaaacaacttcccttttctctctgccttctgataatcactattctacattctgtttctatgggtttaactactttcgatacctaatgtaagtagaatcatacaacatacctttctgtgcctggttcatttcacttactataatgtcttcaaggttcatccatgttgtagcatatgacaggattccctttctttttaaggctaaatagtgttccattatatgtatataccatattttctttatgcattcatctatcagtcagttggggtttttttttttttgagatggagtttcactcttgttgcccaggctggaatgccatggtgcgatctcagctcactgaaacctccatctcccgagtttaagcgattctcttgcctcagcctcccgagtagctgggattacaggcacgcaccaccatgtctggctaattttgtatttttaatagagacggggtttctccatgttggtcaggctggtctcgaactcatgacctcaggtgatccaccgttctcggcctcccaaagtgctgggattacaggcatgagccactgcacccggccagtcagttgattttatttttgagaagagcatcaacataattgagaatggaaaatcttttcaacaaatggtgctgttctactagctgcgtatctatatgaaaaatgatgaaacttgacctttgcctcatactatttataaaatttgagatagatcatagacctaaatataaacactaaatctataaaacttccagaaaaaatagaaaaatatcttcaaaaccttgcgataggcaaagatttctcagatagaacatgaaaagcagtaaccactaacgaaaacacattgaccgtgcacagtggttcacacccataatgccagcactttgggaggcatagagggaggattgcttgagctcaggagttcgagaccagcctgggcaacatgatgaaaccccatctctaaaaaagtatgcaaattagcagggtgtggtggtacgtgcctgtagtcccagctactcaggaggctgaggcagaaggatcacttgagcccaggaggtggaggttgcagtgagccatgatcataccactgcactccagcctgggcaacagggtgagaccctgtcttaaagaaggctgggtgcggtggctcatgcctataatcctagcactttgggagaccaaagtgggtggatcacctgaggtcaggagttcaagaccagcctggccaacatggcaaaacctcatctctacggtaattccagctacttgggaggctgaggcaggagaatcgcttgaacctgggggccggaggttgcagtgagccaagatcatgccacttgactccaccctgggcaaaagagcaaaactccatctcaaaaaaaaaagaaaaaccaccaataaaatggacttcatcaatattaaaaaccgctcttaagtgatacatgcatttacttacatcattaaaatacattgaagaaaaatacccagaacacacactaatttttactttacttgccacactggttttaatttacttgcctcatttaggcaagtaaaacagtttaaatatttgtattttcctcagtgtacctatatttccaggggggaaaaatcagcctaaatccggttgaattttatcatataccttctacaaataaaacctcttaccaacatgaggagaaagagctatagatttactaatagaacttgttagacaatctgttttccaggttcaagcaattttcttgcctcagcctcccagtagctgggataacatgcacccgccaccatgcctgactaatttttgttttttgttctttgagatggagtttcgctcttgttgcctaggctggagtgcaatggcacgatcttggctcactgcacctccgcctcccgggttcagacaattctcctgcctcagcctcccgagtagctgggattacaggtgcctgccaccacgcccagctaactttttgtatttttagtagagatggggttttgctatgttggccaagctggtctcgaactcctgacctcaggtgatccacctgcctcggcctcccaaagtgctgggattacaggtgtgagccaccatgcccggcctgtatttttttttagtagagacaagatttcaccatgttggccaggctggtctcaaactcctgacctcaagtgatccacccaccccgtcctctcaaagtgctgggattataggtgtgagcccccatacccggcctcactagacaatctttaagattccttccagttactaattttgtgtggttttgtcacctactactagtcatgagatcttggatacatcatttttttctttcaatgtttattgaatcacttacgtgaaacctcagagttgacagtcctgaaagggggacttgtgaaaagttaactttatataatgtcatgaatactggctgtcatttaatttccttgaaccctgctcatctgcaaagtggggatagtgctttatctgtatgatgtaaaatgatttagcaaagtcaaaaagtgttgtacaaacacaaggtaatgctatattaaagttataccatataataaggatgtgctttttcatttttgtaagaaaaaaccatgatttaaattataattcttgctgctctagagccagtaattgacccagcaacacttcgtaggagtgcatttgctggagcatatgttttacttttgaaattgcatatttctaaatttgatatcttatgcaattaaatacctctttttactctcacatttaaagagaaagcacttttcctctacaggattggtctctgtgactgttaacagttgtaactgtagtaggtcagtgatacatggtgcaaaacagcctgggataatattgccagctgccagaccagactagggtggctcaagggtaagattaccttctttaatacccgctgagacaagtttaacattgcaaccaggtagggaaataaacaggaaactcttaagaatgaaaggaaccttagaggccatttaatccaactcctgttaggtatacacttggccctccatatccgcaggggattggttccaagacccccatggatatcaaaatccaaggtgctcaagtcccttatattaaatggtgtagtatggtactgtgtatctgttctgcagtatcccagctaagtagttaccagcttcagtttaacttcttccaaggatggggaactcattaaataccaaggtagccagtttcatttttgccagtcctaattgttagacaattattttgaattttgagacttgattacctgttcaaaggtgtttacctattattactcaatgatcattgtcacccacctcccctgatcctatcatttggtgcctgttttaccatattaaatctacaaagacagctatagagtctttgtcatgtgccttcctttagtcataaataattccatttatttgggagaagttattcttaattagtccatgaaagtcctagtgataacgacggttttcttgtctaaatgtctgacagtctgacagttaactgtagaattttgtcagggatcaattcctaatttactggcttatggtgttcaggcttcactccttttttctttttgaaagttacagcatttgcccatctccatctccagttttctgcctcatctcgtgttctccagcatttctaaaagatgatggacaatgattctgttaggatttggtagttgcctaagcattagaaattgtgacttatctgtgtttggagatgtgatttctccttttttatttttatattttttgagacagagtcttgctctgttgcccaggctggagtgcaatggcacaatctcggctcactgcagcctcggcctcctgggttcaaaggattctcctgcctcagcctcccgagtggctggcattacaggtgcccactaccacacctggctaatttttgtatttttagtagagatagggtttcaccatattggccaggctggtcttgaactcctgacctcaagtgatccaccggcctcagcctcccaaattgttgagattacaggcatgagccaccacacctggctagagaggtggtttcatacttggctcattcacctatcttcaactccttttttctgtgtttggtccacctttacagtttaaagagccatgtttatttcaaagaccaggtaaataagagaggagtagtcctgccatctgttaacatgagattaactgattacattttgctataggtcatgtgtcctattaaattatgagtttttccaaataggaactatattttgtctttcccagaatttgacctggtaagaactcagtaaaagttgactgaattttctaaactttaagcctaatctttcttgacttttttcttactttaagaaacactttaggccaggcgtggtggctcacgcctgtaatcccagcactttgagaggctgaggcaggtggatcacctgaggttgggtgttcaagaccagcctgaccaacatggtgaaaccccatctctactaaaaatacaaaaattagccgggcatggtggcaggcacctgtaatcccagctactcagaaggctgaggcatggaaatcgcttgaacccagggggcggaggttgcagtgagccaagatcatgccactgcactccagcctgggggatagagcaaccctgtctcaaaaaaaaaaaacacttaaaaaatggtttttagcatttttcatgagcctcaattcctttagcactttagctttcctatcactatttaagtatgatttttgaatctcatcaatagatttttttttcaactttctgtcttttgtgtgtatcctttaaaactctaatttgatatcatgatagtgtagaattttactagtggaaggagagggttcatctaatttgaatccctatttaaaaattattgaggccgggtgtggtggctcacgcctgtagtcccagcactttaggaggccaaggtgggtggatcacctgaggtcaggagttggagaccagcctggccaacatggcgaaaccccgtctctattaaaaatacaaaagactgggtgcagtggctcatgcctctaatcccagcactttgggaggccgaggtgggcggatcacaaggtcgggagtttgagaccagcctggccaacatagtgaaaccctgtctctactaaaaatacaaaaattagccaggcatggtggcgtgtgcctgtagtcccagctactcaggaggctgaggcaggagaatcgcttgaatccaggaggcggaggttgtggtgagccaagatcgcgccactgcactccagcctgggcaacagagtgagacgccatcttaaaaaaaaaaaaaaaaaaaaaagccgagtgtgatgtaatcctagctactatggaagccgaggcaggagaatcgcttgaactcaggaggtggaggttccagggagccgagatcataccactgcactccagcctgggcgacagagcaagactccgtctcaaaaaaaaaaaagaaaaattaaaaattaatgaaactgaagtttagagaggctaaatggcttgtgcctaacttagatctgtgattttggcaagatttcaaagaaagtgattcagagtatctgccagaatctcagtttcttattgccaggtctgtgccctttccactaattgtttgaattaatcacaattacctatgaagcctcttctcattctttggacatcttttccctattctgtgttaggcatcatttgtaaaaatctcaggagagtttattctttgggaaccatattgccttttcatgtctgtagtcaggagaccttttgtttccagatgagttccatccagcttcgacagctgcattcgctccaaacatttttaaatgtacttgaagtcaacagcattcattctagcccgctgtttccttttcttgctgttgtaagttttagtatgaaaaggttgtgttttctcatgtttcattttttaatttctttctttttctttaaatagagacaggatctcactgtattgcccaggcttgccttgaactcaagggctnaagtgacccactcgccttggcctcccaaagtgttgggattacaggcttgagccactgtgcctggcctgttctctcatttntaaggatcacatcattaccatattggcagccttttcttcccccacactctagccacattaaaaaaaaaaaaaaaactgggctgggcatggtagctcatgcctgtaatcctagcactctgggaggccaaggtgggaggattgtttgagctcaggagtttgagaccagcctgggcaacgtggtgagacctcatttctaccaaaaaaaaaaaaaaaaaaattggctgggtatggtggtatatgcctgtagtcccagctacttgagagactgaggcaggaggatcacttgagctcaggagttcaaggctgcagtaaggtatgatcacaccactgtacaagaccctgtctcgaaaaaaggaaaccttattttttggtataattagattttcggcagatggtctaaaatgctacaatatttgtactagtttttctcaactgtctgcggttgtgtatactataggtgtctgtacttcaattattgtgaccttttctcctaattcaagtgctcttccctgtactttcacactctggttcataggtatctatatgggtttgatgtgtgtatactctgtctgtaccgttactttcttccctgtctttatttattacctcatacataccctttcattgtatatttcaatctggaattccttaatgatatactaactcttggtctgcaaaggtatctctttttgttagtctggtatttgatctgtgcctagtctgaggaactgtgcttgtctgtttccttataataacatttcaaatgttacccatacacctcactttggtatatagctatccaaatccctaaggactgtacttgatgagtctgcctttttcccctccttttttttttttaacctgagcattactgcacagcctgagtgtctgctttctgtgtcagatagtcatcttccagagcatctggcttggcagcttgtttactttctctctcagaactgagtttaaggttttcttgtttcagagggcaagtccactccactccagcttgggtgtcagagtgagaccctgtctctaaaaaaaaaaaaaaagaaatcaagcgtttcatggaagagtagatgggaagaccatctgccagattcttctacttagtatattttttagaagtctccttgagaatcaatccattcattttctgagaaatcaacaaaagtggaagcccgagttcctaggcctgagtcttcataggctctatcatgtattgaatgcccttaagagataccatacacccttcatatagctatatgatttctgtgaactctctacacatacacctcaaacgggattcttgaactaccaacatgcatcacttccttctgacgcaataatagaactcttttatctgtcaaatcctctgattcctctgtatctttctctggaacgtatttcttatttagcatgttttctagaactggtagtggttagtgacagataggccagatcaggaacacctacagctggaagattagtcggtcatactgacaggtgagtcatcttgctttaggatatctaccgaaaagcagatgacaagaccaagtccagtcagccaggtagagtattttgtctagaatgaataaaaaatagacagtagttcagactactagcgttgaagttggggaggttcaacaaggggcaggtatttggaacagagattgggattctcaaaatgaatgagtatcatcagaggggagttttgattgcaagtactaggctttcagctgtgaggccaacattcagaggctagaatcaaacctctgggggtaggtgagaacaagcaggaacagatattatttgaattgggacctaattatttgaattgggaattgggacttaagggagaagtggaaccaatagcaggactgactttacaccaagttgcccaagctaattggctagaattccttgacccacaagattcaaaataggattggtcccagcctgtggttgagtccactggtgagggtgtagtgattccaacttcaatgattaaaaggcagtagaggcggagtgtccctgatagtgctacacagggatggcttagagttccacttgttcagaacttcttttgctcctctagtcttgtcattttttgttcacttatcttttgacatcactttacttctgccttccctccttgaacacttttttcttttctttttttttttgagacagagtcttgctctgtctcccaggctggagtgtagtggtgcagtctcggctcactgcatgctccgccttccgggttcacgccattctcctgcctcagcctcccaagtagctggtactataggcacccgccaccacacccggctaattttttgtatttttagtagagacgggatttcaccatgttagccaggatgatctcgatctcttgacctcgtgatcttcccgccttggcctcccaaagtgctgggattacaggcatgagtcaccatgcccatccttgaacacttttttccatctgacttctcttctgggctgtttctactgtcgcatcaaaaaaagcttttaggctgggcacagtggctgacacctgtaatcccagcactttgggaggctgaggcaggcggatcacctgaggtcaggagttcaagaccagcctggccaacatggtgaaaccctgtctctactaacaatacaaaaattagctgggcaaggtggtaggcacctgtaatcccagctacttgggaggctgaggccggagaattgcttgaacccaggaggcagaggttgcagtgagccaagatcgcaccattgcactccagcctgggtggcaagagcaaaactccaactcaaaaaaaaaaaacaaaaacaaaaattagccaggcgtggtggcgggtgcctgtaatcccagctacttgggaggctgaggcaggagagttcttgaacccgggaggcagaggttacagtggtagacattttttggtcttgtccctttctcccctagtagcaggaaggcctgtgtatttgtagtagacatatttgatgctagtctctggcagggaaaaaaacatagagcacaaatgtagcaagcaataataaaagtttcttgggtatgtgtgtcacgtttttaaaatctctggatgagccagcaggttttattagtcattcctgttaattctgcacctgagatactcctaggaaggagtactttttttgcctttttggtttttttttttttaaagagacaaggttttgatttgtcacccatgctagagtgcagtggtgtgattctagcctactgcagcctcaaactcctgggctcaagcaatcctcccacctcagttttccaagtagctggaactatagctgcgtgccaccccacctggttaattattacaattttttgtagagacgggtcccactattttgcccagattgctcttgaactcctgggctcaagtgagcatcctgcctcagcctcctaaagtgctgggatttcaggcataagccactacatccgcaacttctttgctttttttaggactgttttttaactgactgtttttaactgaccttgttacatttttttcccctagctactcttctttttaaattttagtcagtagcaacctagaggaatctctcctgcgagcactttttcatactaaaaataatggactgtaactaaaggataacagggactatgatcagaaacctctattcatgtattgcttgtttggactaagccttacaggatttgctgggtcttaagaggcccagcacattcttggatattgtttatattgtcctgagtcaggttctttaaattcatatatacagtatgagtttacagggtttttttgtttgttttttctatctctagggttgccatagtttctaaatcttttgaaggaaaaactgatcgcacagaagagtggtatggaacccagtacaaacaagaagctataccggatgaagtcatcaaggtagggttaactcatctatgaataagcctgacatgtgaggaatcacaagaacattgctccctagatccaccaactaaggccccagagtgtggaagactgatgacctagtgttatctgtaccatcctaagagaaatcaacaagtagatagggagctggagtttagccttttcatgaagacatggtactctagccaccttctcatgtgtctatcaaaccaccagggttgtgcctcatgccataaaatgtaactaaagtgcagagtacatgggcacaggcaccagaaaggcaagaagcgatggaagtaggaagcatgagaaaccaatgcaagggctccaaagagctcacagtcttgctgtgaacacaggctgagagcaggctctaggattcataccatcttcacttcaggaggtgctatgttttatgcctcatgttatagcaccgttctttttgtcaacataggagaattatgattttcagaaaaggtatgttaaaacaatattttgtcccattcatcagtagtcaggattttgcttgtgaatgttacctacttatctagtactttttctttctttctcttttggttctcattggctatgtgcctttgagactgcgtcccttattcctgggaaaagaccagaaaactttactcaggctagattctagttaaactcaagtaatggacattttaaaaatgtacctgtgtaatgacatacaaaaaaaggaattagtttaagaaagaagatcatcactggtacttcacagatctctgacatattcatgatacagaagatcattgaagccctccagtgtgtgaaaatgtccatctctctaaactgagaggaaagctgatcttccatgaattagtgctgggtctgaaatagtcctaaaagaagaaagaatccccctgttcactggactctgaccataaccaacctgccctgaatgggaattttatttttttttttgagatggaatctcgctgtgtcaccatgctggagtacagtggcataatcttggctcactgcaacctccacctagctcagcctcccgagtagctgggactataggcgcatgccaccacgcccagctaatttttgtatttttagtagagacagggtttcaccatgttggccaggatggtcttgatctcttgaccttgtgatccgcctgcctcagcctcccaaagtgctgggattacagctgtgagccaccacacccggctgggaattttttaagaacacatctatctgggaactcagtagtgaaattacttactaagtgtttcctagtccctagtattcagctgttctggaaacctaagataccacttaagaaatatggccaacgtccccagtgccgaaagtcacaaatgcaggaactaagaaccgtaaaatctgcaaggctgtgccacaccagctagagatcaaattactgaatccagaaatccagaattattgacaattggtttttttttttaaatagacagggccttgctctgttgtccaggctggttgctttttactcctggccagttgctttttttttttttttttttttttaaataatgaaaagccttataaattaggttcaacaatcagtggcctgtgatctgtcccacttagcttttggaactagaacaggaaacagatccagtctactacaggttgtgtgaatcccaacctaaatctcaactttgttttttctttttttttttttagacagagtctcgtactgttgcctgggctggagtgcaatggcgccatcttggctcactgcaacctctgccttccaggttcacatgattctcctgcctcagcctcccaagtagctgagattacaggtgcacaccaccatacccggctaattttttgtatttttaatagatatgaggtttcacaatgttggccagactggtctcgaactcctgacctcgtgatctgcacatcttggcctcccaaagtgctgggattacaggcgtgagccaccgcgcctggcctcaactttgttcttaaccttgtgcttgaactactggttcacttaaaagttcacatgatcatctgggagaggtgtgggccagttcttaagaagtactgaaagccgagcgtggtggctgatgtctgtaatcctagcactttaggaggctgaggtgggcagattgaggggagtttgacaccagcgtgggcaatacagtgaaaccccatctctaataaaatacagaaattagctgagtgtggtggtacacgcctgtaatcccagctactcaggaggctgaggcacaagaatcgtttgaacctgggaggtanaggatgcagtgagtggagatcacgctgctgcattccagcctgggcaacagagtgagattctgtctgaaaaagaaaaaaagaagtactgaagtgaggccgggcatggtggctcacacctgtaatcccagcactttgggaggctgaagtgggtggatcagttgaggccaggagttcaagaccagcctgggcaacagtgaaacccaatctctactaaaaatacgaaaattagtcgggtgtggtggcacacacctgtagtcccagctacttgggaggctgaggcacaagaatcacttgaacgcaggaggtggaggttgcagtgagttgagatcatgccactgcactccagcctgggcggcagagcaagactgtctcaggaagaaaaaaaagagagaagtactaaagtgaaagacacctcctttagcctggctttcaggccattcatggatataacttagtatagctgaaagtatggctcttatataaatgacctattgtctagcagttgtgggaatatattcctgagcagattattctccattctttaaagagctagaataaacatgatctgcatatggaccagtcagcttttctgtgttccatagtctcaattgttcctcagctggtcattttggagatgtggagaggaagagtagatatatgagtgcaaaatctttgctagtactagaaagactaactcaggtttcaggaaaacccatcgatagatttggtagtacctcttttatatatgatggaaaacaatgctgtgtgacatttgtgcacttaatatttgcccatatattgagcagagatactattttaaactcttaaatcagactcttactgcatttgtgtgtttcattattcatccagaaatggcaaaatgctgacctgaatgggaaatttaaacttcctacaaagaatgaatttattcctacgaattttgagattttaccgttagaaaaagaggcgacaccataccctgctcttattaaggtaatgtgtttgaatcagtgattttaaatttgggggacagacctaatacatgggggactgggtaaatgatttcttacatttggtactatgttgatttggggaggctcacatcctaataggtgacaaaaaagctgcagaaagaataactacaaaaaatattagaaggttaaaaatattaaagcaagcaaacaaaactaaacagtgtagaatctagggaatcactttctttgtaggagaaaaaagtaagtctgagctgtaaccacaagtctgtggaaaggtctgttcctcttttccatgtctgctgaagacccaataaggaagtaggtttatgctgcatcatggacattaaagataagaaaggatctctaaagcctgaaagagagcaagtccagggggagctgttggatttcctgcccttaaaaacattcattatgacatagtgactatctcaaattaatggaatgataaactagtgcaaagggctgttgagaagtagggttccctccccatctttttcagaatgtccttttcatgctattatttcagaacttgagtaaagtatgtaaaaaattgtatcaaattattacagcacattctcccttctaaacgtatttcttctcccttctaaacgtatttcttctcccttctaaactgtttctaaactcatgactgtaggcacacacacacagatgtttctttttatcttcttcagatgacctaacatttggaagaatttagatgagttcaatgagataacaattagtgtttaggaacactaaaatttgtcttaagcaactagattattaatgagacaaccatttttctttattttcttttctttttttgagacagagtcttgttcttgttgcccaggctggagtataatggcatgatctcggctcactgtaacttccgcctcccaagttcaagtgattctcctgccttagcctcccaagtagctgggattacaggcacccgccaccacatccagctgattttttgtatttttagtagagacagggtttcaccatgttagccaggctggcctcgaactcttgacctcaggggagccacctgcctcggcctcccaaagtgctgggattagaggcatgagccaccacgccggacccgtttttctttaaaaatgacattttaaagagttttatattagcttatgcaaagagaaagttcatttacctcagctgttttttatgtattgtttatcttatcttatcttatttatttatttatttatggagacagggtctctctgttgcccaggctggagtgcagtggtgggatcatagctcactgcagcctcaaactcctgggttcaaaccatcttctggcctcagcctcctaagtagctggattacagacgcacaccacacccagctagtttgtttttaattttttgtagagatgggatcttgctatgttgcctgggctggtctagaactcctggcctcaagtgatcctcccccttcagcctctcaagtagctggaattataggtgtgagctaccatatccgacttttgctgtttgttttaaataggccttcccagagcaaactaacgagaacattaaaccatttatatctcttcccagagtttcaaggtagtttcaagtgactaaagccattcttagcatagcatgagtgaagtggagaggcaagataagtagcttatttgttcatccttggccatgttggttatccatggttgcatattaaattattccaaaatttagcagcttaaaaccacaacatttaagttaggccagatgcagtggctcacgcctgtaatcccagcactttgggaggctgaggcgagtggatcatgaggtcaggagttcgagaccagcctgaccaaaatggtgaagccccgtctctactaaaaaaaattagctgggcgtggtggcgcgtgccttatcccagctactcaggaggctgaggcaggagaatcgcttgaacccaggaggtggagattgtggtgagccgagatcacgccattgcactccagcctgggtaacaagagcgaaactctgtcacaaaaaaaaaaaaaaaaaaagaaagaaagaaagaaagaaaaagaaacaacccacaacaattattatctcacacagttttttttcctttttttaaaagactcgcattccattgcccaggctggggtgaagtggtgcagtcatggctcactgtagccttggcctcctgggctaaagtgatccacccacctcagcctcttgtgtacgtaggactacaagcacccaccaccacgcccagctaattgttcaatatttttgtagaggtgggatctcactatgttgcccaggccgatctcaaactcctaggctcaagcgatcctgcctcagccttccaaatttctgggattataggcatgaaccatcatgcctggtttctcacacacagtttctttttttctttctttctttttttttttgagacagagtctctctccgttgcctaggctggaatgcagtggtgcaatctcagctcactgcaacctctgcctcccaggttcaagctattctcatgcctcagcctcctaagtaactgggattataggcatgtgccaccatgcccaactaatttttgtatttttaatagagacagggttttgctgttttggccaggctgatctcgaactcctggcctcaagtcatctgcctgccttggcctcccaaagtgctgggattacaggtgtgagctgctgcaccgtatctcacacacagtttctttgttttgttttgttttttgagatggagtcttgctctgttgcccaggctggagtgcagtggcatgatctcggctcactgcaacctctgcctcccgagtcctggttcaaactattctcctgcctcagtctcctgagtagctgggactacaggcacgagccaccacaccctgctcatttttgtatgattagtagagacggggtttcaccatgttggccaggatggtctcgaactcccggcctcatgatccacccacctcggcatcccaaagtgctgggattataggagtgaagccaccgcgcctggccctcacacagtttctgaggagggtcaggaatccagcagtgacttagttgggtagttctggctcagggcttgtcgtgaggttatagtcaagctgttggccaaggtttcagtcatctgaaggttcagccagggctggagaattctcttccaagttcagttatgtggttgttggccagccttaatttttcaccacatggacctctctgtagagttgcttgacatggcagcaggcttcccccaaagtgagtgatccaggagggaaagtgagtgatcaggatgcaagccgcggtgtcttttataatgcagtctcagaggtataccattaattctgtcatattttgttagtaaggcagaccaaccctggtgtagtgtgggaggggaccacccaaggctgtgaatctcagcaggcaaggattgttgtgggccaccctggaagctggctgccatacgcttgcaagggacttctgcctctgccttcctcctagtgtccagaaagacgaagacaggacagttggtattggcttctctgatctgtctcttccttcactgtacccccatctccctaatacaggggaaatagaaggcagatttcactctgctacaggagtctgcagtctttgtctccagcttcctacctgctgactcttgagtatgcttcaaggcccatgggacagcaactccagaacaaaactctaactattgcttctgtcctcctcctcttgaagagtgatttgattgaacatttttgctgaatgcgcctctatttccctaaccaaattgtttctccatcacaggatacagctatgagcaaactttggttcaaacaagatgataagttttttttgccgaaggcttgtctcaactttgaatttttcaggtatgtaagatgaatctagcttataaagcttataaaaatcaacaattacgtttccaggagttgtctgttcttcttaaacatccatgtctagaaataaaaggaattagagttatttcacctagaaaaggagaggctgaaaaaaataaataaataaaagtaaagaaaaggagaggttggccgggcacggtggctcacgcctgtaatcccagcactttgggaggctgaggcgggcggatcatgaggtcaggagagtgagaccatcctggctaacacggtgaaaccccgtctctactaaaaatacaaaaaattagccgggcatggtggtgggtgcctgtagtcccagctactcaggaggctgaggcaggaggatgcagtcagctgagatcgcaccgctgcactccagcctgggcgacagagccagactctgtctcaaaaaaaaaagaaaagaaaaaaaaggagagctgttgctgttaagaggtattttaaaaaccagtgttgttaattctttttttttttctttccccattaatgagtatgccctttagctgaaatgatttatgttagctattgttaggatgaccttcttagccttcagggttttggattctgaggaggccgtagatttacccagaagaagactcattgaagaaagaataaataatttggggtgtttttattgctttggctttgtattcctggaacttgtctagaagaggaggtactagttactaaatgatcctgagtcttgttttgtcctttgtctggaacccttagatactgcttcctctatttctggcttgattacttaaacattactaataaaaagggagaagatgtttagtaaaatttatgaataatgctattgcagtaatttctcagtgcaccttcaattcatctttgtcttcctttacttatttgtgtgttaatcacctgtttcagattttactttgtgagtttatacttcataattttatatttctaaaattcagtggtttgtaagataagcctatcatggtttatttgttcagtaatgttcaatatgataatcagctttttcattaatttttattcagttggcttgacatgaaattagaggtagataaggtttaaatgctttggaaagagggaaaggaatttgattttccatcaacaaatatgttgagattatagtgattataaatattgtggttttattgcatgagattcacagattatctagaactgtgcagagattttttattgtttacaccaaagatgggctgtcaggttgtggcttattattggtaaagggcattacaaagctgctttttattttttgatatttgagagtgatatttttaacactctaagcagcttgtcaccacttttccatttggcctctatgatgatgaatttctttagactaccctttgagagaccattttacatttttgtgttctctaaactgcctagcgcatttcctagaactgaaaatgtctgcctcccacacaaatccctccctctggtctgtcttcctagaggtaaccactgttctgtttcttgtacattttaattgaaattttcatgtgtgtgtctatatcctttccatcttttcagaaataagattatattatgtgtagttagctatggtttttaaaaccctgtgatccatatttaagcatatagtatctggttacaaaataacgtatttttaaaattaacacatgaaccagaatttaggtatcccagttgaatcctattctcttttaaaagttagtttagggtcttctccacttcaccagcacagctgctgtggatacagctgtttttgttgttctctttttttaggagacagagtcttcctctgtcacccaaggctggagtgcagttactgcagcctcaaattcttgggctcaagtgatcctcccacctcagcctcctgagtagctgggactacaggcgtatgccaccttgccaggctggatgtagcattttaggacactccttggaattattttctgagcctgagccatagtgctttgagacccaaaacttggattttctggcttttcacttccacctgagaaaggtgcatagttgcctgtggggccgacctctgtgatatcctctcttttgttttgatgattttgtttttgtgaattgtgccttaagtttttgagctgctatttgccaaaagaaggaaatctgtcatcatgtatcataccttaaaaaatttaatggcagaacatttattcagattttccagttggagaatatttggatagctgtagaactttgtctttgattttaattctctaagtgactacacattttatccctatttttgcttttttatcagctttgataaaattgttggcttttggctgggtgcgatagctcacacctgtaatcctaacattttgggaagccgaggcaggaagatcgcttgagcctaggagttcgagaccagcctggacaacacagtgagaccttgactcaactttaaaaaacaaaatgttgactttgttatcagtacattagttatatttactgtgctacaagtagagtgaaacttttaatttgctgccaaacaagccaagcaggcacctgcctcaggcctttagcagtagctatttcttcagcctgggaagttctccactccaccccttagatatccccagggctcactcccttgcctccttcaggtctgagtccagatgtcacattgtaagagtggccttgactggccatcttatgtaaagcagcagtctttcttccctgctgccatcaccccatcattccctattccccttaccctgcttaattttaccccatagcactgtcaccaactaatatgtcaaatttaaatttattattatgtgtcccctctagctagattatcaactctgaggtcagggaatttgcctgatttgttcactctttatttccagtgcctagagaagagcctggcactgtagtaagcatataatacatatttgttgaatgagtgagacctttactttcttctgataaaaggtaagcaaggttgtatagtcaaaggagcaggtcatttaacttgcatttgaatcccagctctgctgccacgaactcaggggacctgaagaaaattatgtttcttatctgggaaatgaagtttagttgatcactgtggtggtttagttcttgtactctataattctttcttctttgttctttctcattaaaatatttttctattttatttttccctagttttggctgctgttatatgatagaaattatcaattattttactgacagttctctagctttactgttttggggaaaactcagggataagctaacattttcacaggtctcaatttttctaagttcatgtaattaccacagacacatttcccagtcctttattcctgtccaccaaggatgtgactttattggagagagagggaagacatgcaaatgctgtatctgttctgtcggccgtgctcctcccattagcctaagcacagccatgcattttggcccgttcccactgctcacataccctgcatttctaacttgtcagttctgccacaccatctggggtaggcagttccttctccttcttcactactaccagtgcgcacgcacacacgcacgcatgcacacacacacacacacactcacacacacttcaggcttctttttcagacatcttcttttttttcctcataagaaatagcctcaagaattcaaccatatcctcaggaaatcatattaaccggtgttcaatatcttgatccatctcaaaaggccatatcacattgagaagtaataaaatcagctattttactgtcaacattttcttccagcccatttgcttatgtggaccccttgcactgtaacatggcctatttgtaccttgagctcctcaaagactcactcaacgagtatgcatatgcagcagagctagcaggcttgagctatgatctccaaaataccatctatgggatgtatgtaagtacccacgccttagagccttccactcatcaacattttttatattgatttgatggaagcattttttgattgagggtgtgagtttaatttcttttttttttaatctttatggctaatcatattttctcatttaatttttaagttagcttttattctaagtgttcaactacataccattcatattatgcaaattttccttgatttctttttttttaaacgtctttcatcagaatgtcatatttttctactcaaacaaaattggaccctgatttaggtttagctcttacccattctgtatttgaaatcttggtctttggcaaaggaaaatgaagtcttccttttgtaaaacctaaggttggcatatactatttccctagaaatccagatcatgaggctgcatatccatactcttcggtcatgtttcttcattaccatgccactgcttgaggtatcaaagcatttcttttgtttttctttttgttagtcgctacatttatgctgatcctctccattgcaacatgacatacctgtttatcaggttattgaaggatgatttaaaagagtatacatatgcagcacgcctctcaggtttgagctatggcattgcatcaggaatgaatgcaatacttgtaagtaaaatgaaaaccaaagaaaaggcaccaccccgtttaagcattatgttgagcttgggaaaactattaacttcgcatttttaaacaagaaagttaatggtttttttccttgcatctttttgatgatcaaagaactcaaattagtgttagttccactaatgaatgatttaataaagtttagtgcatcttgtgaacatgtatgtgtgctacgtttatttgcatgctcttctgcctgagatgtttaacatattaatcctgaaagcatattgttctttctatataattgagtatattaacatccgtaagtagaagatatccatagttgttgtggtgattgaattttacttataaataggcaccctttatttctgcagacagtagtataaagtttctatgttcagatacatctgacattttaatttaaaacttattttgtagcatgcaccattacctactttatgtgtgttttaaaataagcatttattaaatccatctaagaaataactagatcctttctttggaatgtgtttccaagcttgcttatatctcaattccgagttaacatcccttttatggcacacattcatcttcacttttcttgaaaatatattgcatattttagtaaaaatgaaaacaagagcattttggggtactcgttgtttaaattcttacacaaaagattgtaggaattttaaattttatttattttccagtgacttttttttcttcacataaataaattctctggtagcttttgtttaatgtataagaatgtttattaatctaaccattcccagagtccacagaagtttgaagctcagagatcaaaattagctccaaatagaaaagtaatcatctgttttctcttttttctgttgatttttagtagcatattaccatcaaaacacataatttttatttatgacaaaatgggttttctgctaattgtcagtctagttcctacagtaggaaaaatgatgtgcttgccgtggccagtggccttccctcctgctgaggttcttgcctatcatcctgtacagcgtagagactttcatgatattctagctgcagtgatatcccctactgctttgcgtgccaccatgtggaaatatcatgatagaaattctccattccccacttttcaaaatgttaggcatttagagacaaagtaaattttgctaagttggctgggcacggtggctcacgcctgtaatcccagcactttgggaggccaaggcaggcagattgctttgagctcaggagttcgagaccagcctcctgggcaacatggcaagaccctgtctctacaaaaaatacaaaaaattagccagacatggtggtgtgtacctgtagtccagctactccagaggctgaggtgggaggatcgcttgagcctgcggagcagaagttgcagtcagccgagattgtaccactgcactccagcctgggtggcagagccagaccctgtctcagaaaaaaaaaaatgtgctaagccaaggtcctgatgatacatacagtgtatcctttttacacatttgttttgccattagcttttggaacaccaacagaacttaccaaataagcaagtggttagaattgtggatcctgcctggcacggtggctcatgcctgtaatcccagcactttgggaggccgaggcaggtggatcacctgaggtcaggagtctaactatgttgcccaggttggtcttaaactcttgggctaaagcaagccttccatctcagctttccaagtagctgggacgacttgtacgtgccactatgccctgtgatttttatcttcttacctcacctgtagaaaccttaagtctgcctttcattagatattctttttgaagaaaaaacttagccacattctacaattaattttataaaaagaatttgagttttgatgatatagtatatgccaccatagttcggtgtcaggtgagtttacttactgttggttttgtttcagaaaagtaaaattatgcttttgggtatagagattgttaatggccaggcactgtggctcacacatatagttccagctacttgggagactgaggcaggaggttcacttgagctcaggagtttgagtctagcctgggtaccctagcaagaccctgtctcgaataaataaatatattttttaaaaaagatggttaaggctgggcatggtggctcacacctgtaatcccagcattttggaaggccgaggcggatggatcacctgaggtcaggagttcaagaccagcctgactaacatggtgaaacgccatctctactaaaaatacaaaatattaaccaggcgtagtggggcacgtctgtaatcccagctactctggaggctgagacaggagaattgcctgaacctgggaggctgaggttgcagtgaactgaaatcgtgccgttgcactccagcctgggcaacaagagcgaaactctgtctcaaaaaaaaaaaaaaagatggttaatgttatcttcctaagtgttacactatatatatttatgacacattaaattgaatttgtttcattttttacatgtctgttttgggattttctacatgtttaaaaatcaagtcgtttatttggaagttgttttgtgatatttttagacttttaataccctgaattctttctgtagctttcagtgaaaggttacaatgacaagcagccaattttactaaagaagattattgagaaaatggctacctttgagattgatgaaaaaagatttgaaattatcaaagaagcagtaagttttctgaaccctgcttttttattcataagataatattgctatattataaaaagttttcataatagtttttataatataaaagaagcaaggaggaaaagaagaattcataaccctgtggcattcatctcaccttgtcattgcaaaatcctatactccatccagaaagaaatcctagtagactctggtggacacctggcctcttctctgtgggtgccaagagctcactgcaattcagagttgcagctctgaatttcaaagagaagcacttagtggctgtcagggcctccttgaatgttccatcccaacctctagttcagaagaacacgcaattcagcagactgaggtctgctttacctcaagaccttgtcacattagagcacactatttgggtttgacatatcttccacttacattcaattcatgtttggcccagtaatggaagtatgggatgaacagctgcttctgaagctaaactatgacctttccttgtatactagaagaaactaccatcagttttcaaataaagattccatattttatatggctacctatttatgttgcttgcttatggagactttggggatggctttatagcgtagaacctaaagattccaaaagacttccctgaaaactagggataactttctgagggactaaagatatcccatagtgaaggcacttatagtccatgtcagatgctgaacaaatgtagcttggacaaagaaaaagcatgcacttttatgtaaagatcggagaggaataaaccccattcttaattatataacttcagaaaggggaaagaagggaatatcctagtaatacagtttatagagaattgaaatttgattataactggacttttgaaatgatttttaaaagatttataaaattaatgaacgcatgtctctttcactagtatatgcgatctcttaacaatttccgggctgaacagcctcaccagcatgccatgtactacctccgcttgctgatgactgaagtggcctggactaaagatgagttaaaagaagctctggatggtgagactttctacttaaagcttaatgctttcttcatttttttcctaaattcattttggtttattctgatattgactgtttatacttttaaataacttgtagttctattaaagctggctgtgtatatgttttataaaaacagtggtgggcaggatggctatagttaacagtaacatatacttttaaataggtagaaggaagatattgaacattcccaacccaaacaaatgataaataaacttgagatgatggatatgcttagtaccctgatgtgatcactatacattatatgtatatataataacattatatactctatgaatatctacaattattatttgtcaattaaaaataaaatgtaaaaaaacagtggtggctttgaagtggtttttgcattcaggcaggttagccacatttactgttttcaatctggacctacaccagttaattattactacttttagatttctgcagaagggctgggttgcacatacctgtaatcctagtacttttgggaggcggagaaaggaggatcgcttgatcccaggagtttgagaccaccctgggcaatatagtgagactctgtctctacaaaaaataataaaactattagctggatatggtggcttacacctgtggtcccacttactcaagaggctgtggttgagaggattgcttgagcccgggaagttgaggctgcagtgagccatgattacgccactgtgctccagcttggatgacagagcaagactctgtctctgcctccaaaaaaaaatttttttttctgcagactaaatgctctgacccaagtactaaccttgttaatattgaaggatttttatttggtgtttttttttttaaagacggagtctgctctgttgcccaggctggagtgcagtggtgcaatctcagctcattgcaacctccacctcccaggttcaagcagttttcctgcctcagcctcccgagtagctgggattacaggtgtataccaccacacctggcaaactttttgtatttttagtagggacagggtttcaccatgttggccaggctggtcttgaactcctgacctccggtgatccgcctgccttggcctcccagcatgctgggattacaggcatgagccaccgcgaccggccaatattgaagttttaagaaaaagttagctgaacttcaaagtcttaacacacaatgttcaggtttttttttttttcctgctttagcatccttagatcagttcagttaaaaattggaaaatgtgaaagcctaaagagtcatcttttgttgtttttttccctagaatcttaagtctaattttcaggagtttggcttgaaaatccaaaattccttaagagcagtgattatacctgccttccatacccctttacttagtatctagtataatattatgccctcagtgtgtatctaatgaatgcctattgaatgtaaagaaattactttcaggatttctttactggaaaaaaatgtagattggtatcaccctttattattgttttagattttttacttctcaacattacctcgccaattaatctttcttcctatgtgctcagccataagcattaaaatgcaataaaaagaattttgggccgggtgccgtggctcacacctgtaatcccagcactttaggaggccgaggcaggcggatcacgaggtcaggagatggagaccatggtgaatccccgtctgtactaaaaatacaaaaaattagccgggcgtggtggcgggtgcctgtagtcccagctactcgggaggctgaggcaggagaatgtcgtgaacctgggaggcggagcttacagtgagccgagataatgccactgcactccagcctgggcgacagagtgagactcttgtctaaaaaaaaaaaaaaaaaaattctgggctgggcatggtggctcacgcctgtaatctcagcaactttgggaggccgaggcgggcggatcacaaggtcaagagatcgagaccattctggccaacatggtgaaacccacgtctacaaaaaatacaaaaattagctgggcatggtggcgttcacctgtagtcccagctacttggtaggctgaggcaggagaatcgcttgaacccaggaggcagaggttgcagtgagccgagatcgtgccactgcactccagcctggcaacagagattccatctcaaaaaaaaaaaaaaaaaaagaattctgttgaatgttttaataaccttttgtgacaagttcttatacttacgtaacactatgcttttgatgtcatcagtgacacaaatcgagcaaagtactgaaagtcattattttgttgattgcctcaggcattggataggagactagattntaaaaatcacttactagaacaggtacatttttttatcaggacagttaatatgcttttctttgcaaaatgattatggtcatatgcaattaatagcaagaattataccttttaaaaataccacacaattaattttaaatgttttccaaaacgaagcctacttttataatgatcaaaaagcaaaggtttgagggttttattcacccttcgttagaatctaggtcagatggcatgttaattttaagcagaataagctctatagtatctcagagggatatgaaggcttcctaaaatggattttgtaaagagaatagtcagttctttttttatttaaattttctgctcaagtaaataattattccattttgatatatatactcctacaataatccaaaatgccagaatggcttaatttggaaacaactcagtgtgagaggctgcctcttcagtgactctaaatcattcagctatccaggtgccagggtagcaagaacttcagggttcagtgtggtccagcagcatttactgactgcctgccatgcacccagcccaagactgcaggtgcttgagattaaaaaatgatcaattaaacatggcaaaaccccatctctacaaaaaatacaaaaattagccaggcgtggtggtgcatgcctgcattcctagctactcaagaggctaaggcaggagaatcgcttgaacccaggaggcggaggttgcaccactgcacttcagcctgggtgacagagcaagactctgtctcaaaaataaataaataaaaatttaaaatgatcaattagatggggtttctttgatcaaggagctccagtctggtggtgaagcataaatgtaagtagatcattttaatagagagagacaagggggtaagtattgtggtggaaagctgcagagagtgccgagggagcctagtgaagaggacccctaaggcagtacagtggaatagaatgaacatccactttggaattgaccaaggatcaaatcccagctctgcaatttactagcttaatgactttgaacaacaaacttaaattttcttaacttcattttcctatctttaaagtggggataatagtagctactttatagtgtgaaagataacatctgtaaaattcctgatctgtggtaagcacttgttatttgcattcccatgtttctccttaaatgtctatcactgattttagcatccattggtagatcttgcatgtagcagttattactatggtgtcctaatggagaagggacagctcttccttacagaaggattaaattaatatatgtaaaaagaaagagggaaatagaaaaattgccattagaactccatagtaataattgctacaggcaataactaccaatggatgctaaaattagtgggtcaaatttaaagaaaaagaaaatatttgtataatctcatttacttttcccaaaataaatatttagtaattacaaagggaaaaataggtgtagatgggcaagtgggcttttccaaattgcatatagagcacatatgagttattaaattataaataaaagaataaaataatacatttacagtgaggacatctggcagacaccaccttaaccaagtgatcagttttaacatcactagtactacaacatatcaacttcatgagtcccctgatagaatgcagtgagaaaggcgcattacctttgtggtattctttgtggtaatacagacatgaaatctaattgtgagaaaacaccagacaaacccaaatgtgggacttctataaaataactgaacagtactcttcaaaagtcttaagatcatgaaatatatggaaggactgagaaactgtcagagattagagggaactaaagacatatgacagctaaatgtaatggagggttgtggatcaaatcctggaataaaaaaaaagataaaaatgggaaaaatccaaataaagtctgtactttagttaatagtattataccaatgttaatttcttagttttgatggttatgaaagatgttaacattagggaaaactaggtgaagtgtttacaggagctctgtgtactatttttgcaagtcttctgtaagtctcaaattatctcaaacaaaaaatccctcataggtagcgctcactatgtcttcttacacctttgcagatgtaacccttcctcgccttaaggccttcatacctcagctcctgtcacggctgcacattgaagcccttctccatggaaacataacaaagcaggtgggtggttgaggttttagcaatcttttgtggatcattgcaagatattttttccctctagtctttctcaagattgttaaccagcatggtgtgataagnaacacattagagtttactcaaccctcttgctctgtggaggaaggtagagggcacagggaaagtagaatgatggtgattaactgaggacctaactttcatggctgcctcctctgctgttttctaccttgtgcaatcataggaggaaatgggagtaattatccctactctgtatagggtggcataattgtatagtagataagagcacgtgctgtagaattagacagcctggattcaaatcctggctctgctatatactagatctgtaatcttttgaaaatgtcttaactctgtgcttatctgttttcttttctgtaaaattagagttacagtagcacctacgtcatgtgtggtaaggattaaatagtacatgctaagtacttagcacatggaaagcactacaaaatttccgtggcagtctgtctcaagatccctcagtctcggccgggtgcagtggctcacgcctatcatctcagtactttggaggctgaggcaggaggattacttgaacccaagagttcgagagcagcctgggcaacataactctacaaaaaattgaaaaacagccaggtgtggtagtgcatgcctgtagtcctagctactcaggaggctgaggcaagaggatctcttgagcctaggaggttgaggctgcagtgagttatgattgtgccactgcactccagcctgggtaacagaacgaaaccctgtctcaaaaaaaaaaaagaaaagatcccttggtctctaccactctgctataccccctccagaacaatatgcccaaggtcagatgctaataagtggcagaagcaagattcttaccaaggtcattttacctacaataaagcctatgtttgcctcccttgcttttctgtgaccccaggtgtctgtagtcaggatcatttcacttgagaccatctttggcagtgccttttttccagcatcagcatcagtgttgatgattgtttgggtgtctgtttctttcaccactaccatattgactctattgcaaaatgaccatactgacaaattcaatttttatccatttgaataggatcaaatatatttaaggttttagaatccacttttatgataaacanagccagtttatttcacaaacaagatatgtttatgtttttgtaatatgctgggacatatctttttccataggctgcattaggaattatgcagatggttgaagacaccctcattgaacatgctcataccaaacctctccttccaagtcagctggttcggtatagagaagttcagctccctgacagtaagtagagatgttgtaactttgggaatggactattttgacataacagtgtgggtgattacaggtgggctgaatttggtatagttttacgccaaagatttacttgggaacctctcctatttacagaattatgattagagataggtaattctgccaaaaaaatttttggtaggagggccaaataagtaaaattggagataggcaataattttgaagagaatgatactggaattgacgggtacttgaatgaaggggaattaggaagtaaaaatatcacaaaggtattgactatgagtcatgaaataaaatacatttataaaaatggaaactggaattataatatttaattggaaacccataggattctttggcagaaatagttttaggaaacccacaggtgcagataacatgtaatcattacaagtatatttttataagggattaacaaagacttttattgaatttatatattggggtttacaatgttgggttacttttacattaacagtggcttcttctgataaaaactcattaagcattattgtcaatattgctcaaaactgtgtaatagaaggtatattaaatgaaggaagagaagctttttttggccaagcttgattgtttggttgttccctatgcatgaaccatctgtgctgccttttccccccagctattttatcctcccaaaatggtgttctcctttcccccttcttcttcatgggccagtgcctacatcctacttctccttccaggcctattttataagctacttattccactaaactttttctaaaactcccagctagaaataatcacatctacctctggacttgcagcacaatttttctgaacctccctattcaagctacttagcacttctcttgtgttgggattgaagtgcatctccatcttcttgttagactgtacattccttaaagccaaagtctgtgtctagttcatttgagtagcttctaaagcaactggaacatattattacttcaggatacctttgttgaatgcttagagatacgttgagcccagctctgctgttgtgcatgaccagtcatcacagatctggtagtggtttatttccaacttttgccagtttattcctcagtcactaaaaccaggacaagactcaggatgtgctgatcccactacaattagagaaagactcaggatattctatgcaagagccataacagttgacttcaaagtgaggccagtgtagaaacaatatttcaaagtgcaattcatccttcttacttcttttgactctacttccctctttctgtctcctttcctaggatcttaatctcttttgcctcctaagtaccctcccaaatttctccatgttcaaaaatagcccagttcacatctcattctcaaaatgctaagtggtaggaaatcatgctgaattagccagctgatcagatgtgaatctttaaatagttcttcacttaactctccatggaaaggcacttagtatttaaaagtaaaatattcaggcctgggtggtggctcattcctataatcccagcactttgggaggccaaggtaaaaagattgcttgaagccaggaatttgagattaggctgggtaaaatagaacttgtttctacaaaaaatttaaaataaaaaaaattagctgggcatagtggcgcacacctgtagctacttaggaggctgaggtgggatgatcgcttgagcccaggaggttgaggctgcaatgagccatgattgtgccactgcactccagtctgggtgccagagtgacagactgtctcaagtgaaaaggaaaattttcaagcattataaaggagatgttttatttatctttatttttgttattattttttgagacggagtcttactctgtcacccaggctggagtatagtggcacaatatcagctcactgcaaccgagaagatgttttagaatatatatgaaaagggccaggcagccgggtgcagtggctcacacctgtaatcccagcactttgggaggctgaggtgggtggatcacctgaggtcaggagtttgagaccagcctggccaacatggtgaaaccccgtctctactaaaaatacaaaaattagctgggcatagtggcaggcacctgtaatcccggctacttgggaggctgaggtaggagagttgcttgaacccaggagatggaggttgcagtgagccgagattgcaccactgcactccagcctgggtgacagagccagactccgtctcaaaaaaaaaaaaagaaaagggccaggcgtggtggcctacatctgtaatcccagcattttgggaggccaaagcaggcggatcacctgaggtcaggaattcaagaccagcgtggccaacatggcaaaaccccgtatctaccaaaaatagaaaaattagccaggtgtgggggcacatgcctatagtcccagctactcaggaggctgaggcaagagaattgcttgaacccagtaggcggaggttgcagtgagctgagatggcaccacttcactccagcctgggtgacagaacaagactttgtctcaaaaaaaaaagtacaaaaaggctagaaggatgtgaggtgggtgagggagagaggcttacaggccacgttcctctctctctgcttttttttttttttttttttttgagacagggtctcactctgtgtcttggtctggagtgcagtggtatactcacagctcactgcagcctcaaactcctggggtcaagtgatcctcccgcctcagcctcccaagtagctgggactataaatgtgagccatggcactggctcccctccttctgatgagagggaacttagtgctgccaatttataattagtaagtttgactgttggtcaaagttggacatgatcagaaaagtgaaatcaatgaaatacaactccaggcttctctacctcccttttctattaatgtctaaattatcatctgtaagtgtgggcagacatagcattgactttattaaaccccaaataagtttttgaacttgctgctgtctttttgaaacttcctaggaggatggtttgtttatcagcagagaaatgaagttcacaataactgtggcatcgagatatactaccaaacagacatgcaaagcacctcagagaatatgtttctggagctcttctgtcagattatctcggaaccttgcttcaacaccctgcgcaccaaggagcagttgggtgagaggaaagtggggaaatagcagggtactgtagactntgatgaattattttccctgtaaaacattttccacattttcacctaacactgtatatcaggcatggtctacttagagagacttgagaaaaccttattacanagaatccacttctaaaagataagcaatcactatcttatggacattaaagcaattatttatgagatgatactgcatattacatacatgtcaataaagaggncattttaggtgggggaaaaggatactaaggacaagcttatgggtagcaagatgagaaatgagccatccagaggagcttagattcactaaagcctgagttccttgagggcaggtattatctctcattcgtctttatatcccaagcctgggacatacagaaggcacagcaagtgttcccagttttagatactgttaaaagtcttgaggtactggcagatttgatcaatgaggaaagaagctcaaagaagccccagtaatgacagaaaggaaccagtgaaaaaaggatgagtctctccaagtacccatcattgtttaaatacccattgtgctaggtgctggacatggaaaatggatgctctggatggtccttcctttcgaggagctcacagtcaaatcaggatggcaggcctgtaaaggaataattttagtacagcatggtaaatgttattataagagctcaaactattggccgggcacggtggctcacgcctataatcccagcactttgggaggctgcggcgggtggatcacctgaggtcaggagttcaagaccagactggccaacatggtgagaccccatctttactaaaaatacaaagattagctgggcgtggtggtgcatgcctgtaatcccagctactcaggaggctgaggcagagaatcacttgaacccgggaggcagagtttgcagtgagcggagatcgtgccacttgactccagcttgggtgacagagcgagactccatctcaaagaaaatcaaactgtgaatggctatgttgaagatagaaacttcctcagaagtgagacccagaggcaccacagctgttggaggtggtagatcagggcagggcagctgaaggagataagccaagagcttggttttgaaaaggtgttgaaggaaggtagtgcatgtcctcatgagataacatggaagtatgacttttagttagcttgatctctagagagttgcattctgaattaattggttcaggaatggattatctaacaagaaatacagtaggagagccntgttcatatgcggaacttggatgttaaaggaaacacagctaggactgtcactaagggatgaaaatgagtccagcattttatattctgggagtaactttagcatagattgaagaggattaactcacagagagtgaggagtgacaagatgggagtttgaataatgaataggatttttttcctaagaagaagaaaaagtcatctccaactttgtaattcttcagagagctcttctgctctgtccttaggaactgaaaccatcttaagtgctcatatttctttaagaggtgaatactctaaaaccttaaactagattttatttgctcagacaggttagtttttgaaggattaaaaatgacccaggtctcaaatgccacggtcatgactggctgatgtctgtgtttcaggctatatcgtcttcagcgggccacgtcgagctaatggcatacagngcttgagattcatcatccagtcagaaaagccacctcactacctagaaagcagagtggaagctttcttaattaccatggaaaagtccatagaggacatgacagaagaggccttccaaaaacacattcaggcattagcaattcgtcgactagacaaaccaaagaagctatctgctgagtgtgctaaatactggggagaaatcatctcccagcaatataattttgacagaggtaaggtaaaattagggctccaacatttatggcattcaagtaacatttgattaaggccattctacaaaatggtattcattttgtaggtgatattccgttacctatttggggagttggggtggggggatggctggcacttccaaagaactgttacttaatttaaccccagttttctgttagaaaccttatctcttttttttccctccaaacctagacctggatctacccatatctcacaataaagtattaataattcaatttcacatttttgtttcatcagtgtatcctgagattctgatcacagatacctaagtatctatttcccataatactaaaaaaatgagataataccagattgaacccctttgaggcaaatgctgcccttgaggcacaggagttcaaacatttgcctgtagggatctccaaagatttttcactcctttcagatttgggagagctgtgattcttgaagtctcttgtcttgaatcagcttcctttcaccttgcttctagagcatagattaacaacggattgtgctaagctgtactagaagtcagaggatgtgggttgtgttcttactctgacaccaacaagctaaaaatcttggtcaagacaccttttttggacctcagtttccttacccataatttttatttttgttttgttctttcagagagtatctcactctgtcagccaggcttgagtacagtgtgtcatcatagctcactgtagccttgaattcctaggctcaagcgattctcctgcctcaggctcccaaagtgctgggattacaggcgtgagccaccacgtccagcctacttataatttatctagcagttggattcactattaatgataatactntctctcatttattgagcatttgccgtgtacctagcagtgttattgtcatgtatctttttcctaattctcactgcagcccttattaagtagttattatccccaatttccagatgaggaaactgaggcttagaaaagttgaggtgactggccaagatccaaaagctcataaccagagagccaggatgtgaatccaggctggcctggctcctgagccaaggctcttacccattgcactacatccacttattattttttttttaagatggagtttcgctcttgttgcccaggctggagtgcaatggcacgatctccggctcaccgcaacctccacctcccgggttcaagcaattctgcctcagcctcccaagtagctgggattacaggcatgtgccaccactttgtatttttagtagagatggggtttctccatgttggtcagggtggtctcgaactcccaaccttaggtgatccccctgcctcggcctcccaaaatgctgggattacaggtgtgagccactgcacctggcctttttttttttttttttttttatgagacagttttgctctgtcgcccaggctgtagtatagtgatgtgatcttggctcactgcaacctctgcttcccaggttcaggtgattctcatgtctcagcctctcccgagtagctaggtctacaggcatactccactatgcctggctaatttttatatttttagtagagatggggtttcaccatgttggccaggctggtctcaaacttctggcctcgagtgatccacctaccttggcctcccaaagtgctgggattataggcatgagccactgtgcccagccaacatccacttacttttatttgaaatcaaagcaaatggtcacgtaaaaatgtggatgcttggctaggcacagtggctcacgcctgtaatcccaacattttgggagtgcgaggcgggcggatcacgagttaggagatcgagaccatcctggctaacacggtgaaaccccgtatctactaagaatataaaaaagaaaaaaaaaattagctgggcatggtggcgggcgcctgtagtcccagctacttgggagactgaggcaggagaatggcatgaacccgggaggcagagcttacagtgagctgagatcgcaccactgcacaacagcctgggtgagagagcaagactccatctcaaaaaaaaaaaaaaattgtgaatacttggccagacgcgatggctcacgcctataatcccggcactttgggaggctgaggtggacagatcacttgaggtcaggagttcaagaccagcctagccaacatggcgaaaccccatctctgctgaaaatataaaaattacccagacgtgttggcttgtgcctgtaatcccaactactcaggaggcttaaggcaggtgaatcacttgaacccaggaggcagaggttgcagtgagccgagatcgagccactgcactccagcgtgggtgacagagtgaaactctgtctcaaaaaaaaatatatatggatacttaagagtcttggagtgaagtatattgtcatttagtgtactgttctgggctgcttcatatgaaaatgttagtaaaatattgtttgattactttttcagataacactgaggttgcatatttaaagacacttaccaaggaagatatcatcaaattctacaaggtaagtcaaattcatatatttagattttgactgatatgaaagtattatagggctgggtatggcggcctacacctgtaatcccagcactttgggaggccaaggtggaaggatcacttgaggtcaggagttaaagaccagcctggccaacatggtgaaaccccatttatactaaaaatacaaaaattagctgggcgtagtggcatacgcctgtaatcccagctactcaggaggctgaagcatgagaatcgcttgaacctgggaggcagaggttgcagtgagtggagatcatgccactgcactccngtctgggtgacagagcgaaactgtgcctcaaaaaaaccaaaacacctattgtatgtgctatattgtgtgttgctgctttgaagccattcaggctggatttatgaaggtgtttttgtggatttgagttttttgacacaaacgcttaatgacttttagaataaagatagtttttattgaaccaagtactgttttcctctccctctaaaccaagtttgctgaacctgcagcctgcgggccatgtacagcccacattatgagatattttgcaaattttttttcttttagcttatcagctattgttagtgtattttatgtgtggcccatgacaattcttcttcttccagtgtggcccaaggaagccaaaagattgacccatgctctaaaccaaggactgtgacagcccttcctgacttccagatctacctttttaggcaccctttcagtttcttctctctgttctccaccctactctgcaaagaatattgctgagcttgtttggtgggaaggaagaacaaagaaaacaaaagaacttgagaatcagattattttccaagctctgacaactataaattatcttcacccatttaggtgccactgtggctgctttttaaaataaatgattactcacctttgaattgtggtcagagatattataagttttacatgcttgcgctcacttaggaagtctatcaaaaagaaagggaggcaccaccattaaagtcttcccagcaagctttaagagattcacaccggctgggcgtggtggctcacgcctgtaatcccagcactttgggaggccaaggtgggtgaatcacgaggtcaggagttcaagatcagcctggccaacatagtgaaaccctgtctctactaaaaataataataataaaaaaattagctgggcatggtggcgggtgcctgtaatcccagctactcaggaggctgaggcagaagaatcacttgaacccgggaggcggaggttgcagtgagctgagatcgcaccactgcacaccagcccgggcgacagtgcgagactctgtctcaaaaaaaaaaaaaaaaaaaaaaagaggttcacaccatctaaatcttcccctatataaaaattctaagaaggatagcaaaatttccattaggtaggtatatnaatgtgtaataagtatgctaaatgcaaaaactcaaaatttgtgctgcaatggaattgcacctaaagtgttacatatgttttttgtaatatattggggcctctagtttgtgtaaaatactcatatgcctatttttcaaaataaggagcaaaattatactctgtgattaccatagtaccttagaattgtcccttaatgttctagccatttctggtttgtatctgtcattatgttgtttggacggggactcagtcctgccctgtgcccacatccttttagagagatactctacagtatttttttctagggatgtactatagctaccagcataggagtcagtgcttacagttctcattagaatgactttgtgaagttagtggtacaatgaggcttgatcacattttctcctgtactagggtttctaatgtttatttaattcaccactcctagtgctgagtgagagggtaaggaaaaagtaacagtctttgacccaaaggtgctgatagtttctttgaggaaaatggtgattttgtatcatccatgagttgcttacacctctcccagcaactcttctgcaaaattattaaggctgtatgcaaacaagtattaatatagctgatatcaccttaacaataagaaaaggagactatagtttcagaactgagcagcagaagccagtattttgaaagcacctttttcagcaatgagatttgacccattttggctacaaaaatggatggctggacaagtgattttctttacctcatggcttcctttgcattgtatagaggaaaagaagtgtctcatctaaattactcttgttcttttgcaataatagcctgtagtcccagctgctggggaggctgagacaggaagatcgctagagcccaggagttcaagaccaaccttggaaacatagctagaccctgtttcaaaaaaaagagagaggggctgggcgtggtggttcacacctgtaatcccagcactttgggaggccgaggtgggcagatcacgaggtcaggagttcgagaccagcctgaccaacatggtgaaaccccgtctctactaaaaatacaaaaattagccaggcgtggtggtgcacgcctgtaatcccagctactcaggaggctgaggcaggagaatcacttgaacccagaaggtggaggttgcagtgagccaagatagcaccactgcactccagcctgggcgacagagcgagactccatctcaaaaaaaaaaaaaaaaaaaaaaaaaaaaacagagagagtatttataaccaggcctaagctaagtctggaacagcatttccctagctgtgttccatggtatgcaagatattaataggggtacctaggaaaagggtttcatgaccatacaagtttgggaaagactattcgcattcttagagaatcagagtgtattggtattttagaaattataagaagtcccacagtaaagactttagcctgcatttatttaattttgactaacattttctaaactgatttcaccatgcatccttttttacacagaatacctataaatatctcccaggactgtagtgttccttagaacatattaatagtttgcaagaaggtgcagttgtttgtttttagaaaaatgaggattgtccagagttggtcagaaaatcgggaacaatctgaaactggagaaggtgttctgctgtctgctgatgtgggtagacaagggggtaatgaaggtttgggtgacaagagatggagaagagatctttggaagcaaactttttactccagtaagatgaagttcttagatgaggtactacatgttaatagaggcagacctgggctgagttcctggaaagaggctggagaggtcagagcaggcctgtgagaatctgggctgttttgcctgctggcagggagtagagtggggagccacgggcaggattgctgtgcaacatcaacagggcttccttgcagtcacataggaccaggcttattagtaactgcccagttactagtaactagtaacagttattagtaaataactgttgagtggatttggtttggctgatgatttctttcctctaaggatatgaaacgttgcttgtggctaaggaataagaggaactttgtcacaattttgtacccctttagaaaagacagtagaagtctgctgttaagggaaaggttgggacatacttccccacaggatccacctgccaacttagcactgctggcattcatggtagtaactaaggggaatccctccaagcagcatggtggaatggagagagcaagcagactctagcttctgacaccatcacctatgaactgtgtgacccatgtaattcatgtaagctgctgtgtcttagagtccatgcctctaaagtaagaatcatcatgatgcttagttcacagagaattaagtgagctgacataggagagtgcctgatataacgcaggactcagtaattgttagtttcctttctcttttggtagatgaaccacagtttacaagcagagtctgagaaggttcttagaggagcaggcactcgtgcttgtccctgactaagctcagaccattgtctctgtagacactaaagatcaccaagtgcagccctgcacagcccatcccagtgagtactaggctaggtttttaatcctagctcaggcacttattagctgtaggagtttgagcagttttttaatctccttggattcagttttctcatctgtaaaattgggttaaggataattctttccttagagtaagaaaaggaaaggaaaaaaaaagaataattcttgcgtgccttgctaaatctttctagagcttaaataaaataatgtaagtgaggggaaagaaagggaagtatcttttctttttctttttctttttttttttttttttttttttttttttgagacagagtcttgctctgtcacccaggctggagtgcagtggcgtgatctcggctcatggcacatggcaaacttgcttcctcgtgtcaggcaatcctcccacctcagcctcccaagtatctgggattacaagcatgtgccaccacatttggctaattgttgtatttttggtaaagacagggtttcactatgttggccaggctggtctcgaactcctgacctcaagtgatccacctgcctcggcctcccaaagtgctgggattacaggcatgagccactgcacccggccagaaagggaagcatcttttctatatctgactgtgtgatagctgattcttcatagtcttcagagaacacctcattgtaagttctttagtggagcaaaagggtgaccctgctcttctttgtgcctaggaaatgttggcagtagatgctccaaggagacataaggtatccgtccatgttcttgccagggaaatggattcttgtaagtatcaaatgttgcctttttaggctcatgttgagccatctgatggttggcctttgtcatagctacatgccttatagaacaccagaaagtaaaagaggtagagaacggaaactggagataaggtctgcagatataaggggaaaagagaaatgaggtagtgaaggagagaggcaataccaggtgatagaatgccgagctagccacagcatcacaggaaaacacagctgcttgctgttggggtgtctccaaacaggctgcatgaaccactgcatgtggggagtatgggtaagcaagttaacttcccagtcctttcgtttcctggcttttactggccaaagtttgtcctgtggccattaactcccttgctttctgggcagtttagtaaaactagtaagtttactaacagtttagaaacctagcaaggtccttctgggtggacagaaagtcacattagacctgggccctaaaactgctgtggccaaagttttatgacctcaggaatatcatgagccatcactgggtggctctggatagaaggcaggacaagtacttaaggccttgggtagcaggcaacctttagaggatctgagaagtacatgaacggggctggtgcggtgtttttaattaactgagtctggtttagttttttttttttgttcttttgtgatagtatcaataagtacaaagtattaaaccttttattttcttataggtcctgttgttggagagttcccatgtcaaaatgacataaatttgtcacaagcaccagccttgccacaagtaagaaatataacgttatgttagattgtactgacagaggactttctatttagaagaagcagcttggttttttttgttttttgttttttgtttttgaaatggagtctcactcagtcacccaggctggagtgcagtggtgcgatctcagctcagctcactacaacctccacttcttgggttcaagcaattatcctgcctcagcctcttgagtagctgggattacaggcacacgccaccatgcccagctagtttttgtatttttagtggagatggggtttcaccatgttggccaggctggtctcaaactactgacctcaagtgatccacctgcgtcggcctcccagagtgctgggattacaggcacgagacactgtgcccggccagaagaaacttgttcattgggaactaaaagtgatgaactaaaagtttcaggtcaccaggtgttggagcttctactttagttcttccctgaacatctagtcactcagcctctacccttgtctgcctttgcctcctgtttgaacagttgtgttattttgcaatggatcatttctggccacatctgttcccagcactgaatactggagagagacttcttagtctctcccatgttacctgcgtattttaatcatctagaaggattgacattagcttgcaagaggaggaaactggcagtgtaactaggctttttgtgggtgggcacaccagcctctgctactctgctgaagccttgatgcgaagcctctaagtccttggtgagccagcccttgtttgcccagaggaaaaccaaaaggactaaggacacttaccataggtttgtacagaccaattcacgaccctccagacatactgatccagaagaaaggtcagcagatcaagatacatgggttattaggtagagcggcctcaagccaaaacaaaaaaacagtatattaagtagaactgaggtatgctcccagtgtccgccaaaaaaagttgatgtccttattctgatgtttaggttaaatacactaaaaggaaacttttttctttgcagcctgaagtgattcagaacatgaccgaattcaagcgtggtctgccactgtttccccttgtgaaaccacatattaacttcatggctgcaaaactctgaagattccccatgcatgggaaagtgcaagtggatgcattcctgagtcttccagagcctaagaaaatcatcttggccactttaatagtttctgattcactattagagaaacaaacaaaaaattgtcaaatgtcattatgtagaaatattataaatccaaagtaaattacaaaatcttatagatgtagaatattttttaaatacatgcctcttaaatattttaaaatttttcttttgattactgagagaaatttccccaatataacaatgcttaaaatgaatgatattcctatagaatcttccttccctattctgtaaaatagtcacttgtccgaagaaagttaaaagttagctcttttctaaaagcctcctagcttgacatagaaggcttcacaacatttagaaaggtaataactttttaaaaattgatcctcaaatttgctttctacttgatggtttcatgtaaatcagtggaaaacattacatttggcagatgataaagcaatgtcatcttttattagtgaaatgctggttatataaggcatggttttaatctttttataaaatttgaacatgttttttatgccaactcgtaaaatgctagaaaaccctacttatttacaatgctagaaatacagacttaccttacatcaattttgtcctaaaccgaatttctcaggattactgtggtttctttcattctgattgaattatattgacctacttcttcatagttggtttgcagtgttccatgagttttacttttcctcatcaacatattgctttaacacaacatatttatttaacacgtacaaatagggtcaacttcagatcctactgagtgtgtgacatgcttttccaacatcagctttttgtaaccacctgtataactttttattacagtgaaattgcagtcagtatgtgaaccaaaatatcttgcccctttatgaatttaaaaggcagccaatacaaagccacctttttggaaatataaaaagtaaagccttgcattcttatatagcaggtcttcataaaactctaaaatcccttgttgctaccagtctaatcttgccttaaatgttaagttattttttgaatatataaatataaacatataaacacagatgatgactggagtagacttttaaaaaaatatttttttcatgagatactattttaggtgaaattgttactgtagatttaacagctgttttgaaatatttactgttattaaaacttgcttcaagagaaattgtgaatatatttccatatacaagcactagtaacagtaagtggccctgtcatccactaactcaggcaaagtaaagaatggcatttttgaaggacattttacctccccatatgatttgattggctaggactttcttctgtaaagtcataccttttcacatcttaagtttttacatttgccattttccaaatctcaattttgggcaagaangatatagtcacaactatggggctgctttcaaaagcggggctccatttctactgtcagatcaatgtggtgctgtaaccatctttttatccctaccttcaagaacctccttatatgaagcctgtctttatccatcagaaggtgtgtgaaatcatcacttccttctggttttatgtatttgtagactatgcagcttttcattaaactgcaagtatatacaagacagatctgaaattaggcctgagtgttccgatccaccactgtactagtaaataaaaatccacctaccttttatgtggaaaattatgtgctattgagtaacttttagctcttttttaaaaaatgggtgaaatttaagtgtcttttttatgagaatgacacatgaagagatctgagagcaatctcatgtagtcttccatgaacctgcaattgtttggtatgcgtcagcattttccaatttccaggttggatctagagctgctgttgatcactcaggcatactaatggattcatttagatgggtccaagctgcagtccatgagcaataacagactaccccagatactgcagtttacgcagtgcttagtaaatgagatttgtggaactaagttattagttacctgaggcttcttaagaaagtcttcttttttgaccagttgatgtgaaagagggagcatgtgacacagccagtatggtggagtgctagggttatcctgtttacaataaatcgcctgaatttcacctctggagtctgcatttgtattatttttccagttttagtgaaatagtacagtggccagtcctcagcctacctctcaacatcccagtttgaccagatttcttgctttcattgttcataatgcagaaagcagtgaattatattaacattttaaaagtgtttctgggtaacaatgatttttgtcaaatagaagactcaatttcacaaccttaagaatagatcacttttgtaaaacaagaatctcagtatttgatgttggactccttgctgtgagtattgtcactgactccaaacccagaaagatttgttcctgcccttacagggatgaaaataaaaaggatagaaaaaatatttctctcctctacaatgagtccttacatcttcttgccacatctccagctgcagtttaggcagatatcttgttcaatctctgtcttcttgatccctgtcaaaataatttttctactcatatagtggccagttggctcaggcaggcatttcaagaggaatctgcttgttcctcacttttccagcataggacagtggtccagcccgcacagtcagcattgttctcagggacgatgtggcagccccacacagaggccaagagcaacagagcaactccaggatttatgagttgggacagtcgtcctctcattcatgatacatggagggactcaggggactcagcaggtccccctgttgttttttagggtttttgtttttgtttttttttgagacagagtctcgctctgtcagccaggctacagtgcagtcgtgcgatcttggctcactgcaacccccgcctcctgggttccagcgattctcctgcctcagcctctggagtagctgggattacctgtgcgcgccactgcgctctactaattttttgtatttttagtagagatggagttttgccatgttggccaggctggtctcaaactcctgacctcaggtgatccacccgccttggcctcctaaagtgctgggattacaggcatgagccactgcacccagcccacagtctttcaacagggaggatagtgataaaaaatttcatcatcccagattttcagaggtggaaataggctcagaaaggctgaatagtttgcccaggatcatccaggaagcagattcaaacctccactcagctctttggactttagatctcattgtaccatgtggatttcctgtagtaatagcttccaagccgatgaacatccttgtaaaacaaatagacagttgcttttacatgtgtatataactttacctttttctcatttactgtcttacttgatctcttaaccttgcctattttggggggcatgagaccagatctcacagtcttacacagtccacttcgccaggctactttgagaccagttgtcactactgcctgcagaatctccttcccttccttttgggggtaatccaggtcttaaaccagtgtaagctctttttcctattgctctggagtgatagtttctaggatctttcaagaagtttggaagaggccaggcatggtggctcatgcttgtaatcccagcactttgggaggctgaggtgggtggatcactcacccacctggtcaggagttcaagaccagcctggccaacatggtgaaaccccatctctactaaaaatacaaagttagccgggtgtggtggcaggctactcaggaggctgaggcaagagaatcgcttgaacctgggaggcggaggttgcagagagcggaggttgcagtgagctgagatcgtggcactgcactccagcctgggtgacagagtgagactctgtcttaaaaaaaaaaaaaaaaaaagtttggaagaggagtgtgaggaagagtcattttcacttgtgacaccaccacagagacagccactgcttgcatggtgtttctctgcagtcttcttcctgtgcatataggaaggggtcacgtactcagtgtgggaactcttcccctcagtagcctatttatactgagcattttccacatggatacccttgaaaaaagtatgtcttttgttgttgttgttgttgttgttgttgttgttgttgtcggcggcggctctttggtatcgtattgtttgtttattgaatcctctgtgggggttttacggtgttttcaagttctgatctgtgataaactttcttgtgcagagtatgtgtgtgattttctgattattcccttaaattgccaggttatggaatatgaatatattatttaactttatatattgaaaagtgtttaatctacagaaaagttgttgaaatagtccagtgaattcccatatacccttccccctgtattgaccaatgttgtttgtttcatatcctgtccgttctctctcttatgtgtgtatgtgtgcgtgcgcacgtgtgtgttttgccaaatcatttgagagtaagttgcagatgttatgactccttacccctaaatactgcatcaagtgtcttctaataacaaggtcagtatgtgataaggaattttccgtcactcagagggaagtctggcctttgtcttctttctctttgctatagacaactatataccagtaaatctgacaacttagatgagatggacacgttccttgaaagacacaaattgccaaaagagacatgaaaagaaatagaagatttgaatatttccttacctgttaaagaaagtgagtcataattgaaacccttcccataaagaaacttccaggcccacatgacttcactaatgaattc

SEQ ID NO: 188 - DNA, 23 bp, Artificial Sequence
  Primer
atggtgaaaccacatctctactg

SEQ ID NO: 189 - DNA, 21 bp, Artificial Sequence
  Primer
ccagaaactaagcaacgactc

SEQ ID NO: 190 - DNA, 23 bp, Artificial Sequence
  Primer
atggtgaaaccacatctctactg

SEQ ID NO: 191 - DNA, 21 bp, Artificial Sequence
  Primer
ccagaaactaagcaacgactc

SEQ ID NO: 192 - DNA, 22 bp, Artificial Sequence
  Primer
caagactccgtctctcacacac

SEQ ID NO: 193 - DNA, 22 bp, Artificial Sequence
  Primer
gccgagacgctagaattgagtg

SEQ ID NO: 194 - DNA, 20 bp, Artificial Sequence
  Primer
cggggctccagtgaggatac

SEQ ID NO: 195 - DNA, 20 bp, Artificial Sequence
  Primer
acacagcaaccgggtgtcat

SEQ ID NO: 196 - DNA, 20 bp, Artificial Sequence
  Primer
ttggtccggctactctgtct

SEQ ID NO: 197 - DNA, 20 bp, Artificial Sequence
  Primer
tgaacagaacgcggagaacc

SEQ ID NO: 198 - DNA, 20 bp, Artificial Sequence
  Primer
aagcccctccgcccctcaca

SEQ ID NO: 199 - DNA, 20 bp, Artificial Sequence
  Primer
gctgcgacgccatgacggtc

SEQ ID NO: 200 - DNA, 20 bp, Artificial Sequence
  Primer
aagctgccagaattgtaatg

SEQ ID NO: 201 - DNA, 20 bp, Artificial Sequence
  Primer
ggacaaacaacacttcggta

SEQ ID NO: 202 - DNA, 20 bp, Artificial Sequence
  Primer
tttcgcatttttcttgacaa

SEQ ID NO: 203 - DNA, 20 bp, Artificial Sequence
  Primer
attcataattcagcccacta

SEQ ID NO: 204 - DNA, 20 bp, Artificial Sequence
  Primer
gcccactagaagccatctga

SEQ ID NO: 205 - DNA, 20 bp, Artificial Sequence
  Primer
attcagagacaactgaaatt

SEQ ID NO: 206 - DNA, 20 bp, Artificial Sequence
  Primer
ttgtcagatggcttctagtg

SEQ ID NO: 207 - DNA, 20 bp, Artificial Sequence
  Primer
catgcacccatatgactctt

SEQ ID NO: 208 - DNA, 20 bp, Artificial Sequence
  Primer
gcttctagtgggctgaatta

SEQ ID NO: 209 - DNA, 20 bp, Artificial Sequence
  Primer
tggcttctagtgggctgaat

SEQ ID NO: 210 - DNA, 20 bp, Artificial Sequence
  Primer
tagtgggctgaattatgaat

SEQ ID NO: 211 - DNA, 20 bp, Artificial Sequence
  Primer
taaaaatacaaaaattagcg

SEQ ID NO: 212 - DNA, 20 bp, Artificial Sequence
  Primer
ttatgggctataattgcact

SEQ ID NO: 213 - DNA, 20 bp, Artificial Sequence
  Primer
cgggcatggtggcaggcagc

SEQ ID NO: 214 - DNA, 20 bp, Artificial Sequence
  Primer
tagtgcaattatagcccata

SEQ ID NO: 215 - DNA, 20 bp, Artificial Sequence
  Primer
agtgttgggattataggctt

SEQ ID NO: 216 - DNA, 17 bp, Artificial Sequence
  Primer
tggccatgctaactttc

SEQ ID NO: 217 - DNA, 20 bp, Artificial Sequence
  Primer
gttttttgtttttctagtct

SEQ ID NO: 218 - DNA, 20 bp, Artificial Sequence
  Primer
ttcaatacaaagccctccct

SEQ ID NO: 219 - DNA, 20 bp, Artificial Sequence
  Primer
tttgagggcctctgtcttgg

SEQ ID NO: 220 - DNA, 20 bp, Artificial Sequence
  Primer
gaggccctcaaacaagtttt

SEQ ID NO: 221 - DNA, 20 bp, Artificial Sequence
  Primer
gggatgaagatggctaagaa

SEQ ID NO: 222 - DNA, 18 bp, Artificial Sequence
  Primer
tgacccctccttataaca

SEQ ID NO: 223 - DNA, 20 bp, Artificial Sequence
  Primer
ttgctttgccatacttatgt

SEQ ID NO: 224 - DNA, 20 bp, Artificial Sequence
  Primer
acccctccttataacacaaa

SEQ ID NO: 225 - DNA, 20 bp, Artificial Sequence
  Primer
ataccctgacccaccccaat

SEQ ID NO: 226 - DNA, 20 bp, Artificial Sequence
  Primer
atgatccccgtaacaaggta

SEQ ID NO: 227 - DNA, 20 bp, Artificial Sequence
  Primer
gctttgagaagtcagagaga

SEQ ID NO: 228 - DNA, 20 bp, Artificial Sequence
  Primer
ttttgctgcccccttttcta

SEQ ID NO: 229 - DNA, 20 bp, Artificial Sequence
  Primer
attttagaaaagggggcagc

SEQ ID NO: 230 - DNA, 20 bp, Artificial Sequence
  Primer
cggggatcatcaaacatctg

SEQ ID NO: 231 - DNA, 20 bp, Artificial Sequence
  Primer
ttgacataccaggcaactgt

SEQ ID NO: 232 - DNA, 16 bp, Artificial Sequence
  Primer
gcccaccttggacttc

SEQ ID NO: 233 - DNA, 20 bp, Artificial Sequence
  Primer
gtttcgaccccacccacatc

SEQ ID NO: 234 - DNA, 20 bp, Artificial Sequence
  Primer
atccgcccaccttggacttc

SEQ ID NO: 235 - DNA, 20 bp, Artificial Sequence
  Primer
ctgggtttacaggtgtgagt

SEQ ID NO: 236 - DNA, 20 bp, Artificial Sequence
  Primer
taatgactgggcaacttgat

SEQ ID NO: 237 - DNA, 20 bp, Artificial Sequence
  Primer
ctacaagggcagtaatgacc

SEQ ID NO: 238 - DNA, 20 bp, Artificial Sequence
  Primer
tgctggcgatttaatacatt

SEQ ID NO: 239 - DNA, 20 bp, Artificial Sequence
  Primer
tttccgattttaacaagctc

SEQ ID NO: 240 - DNA, 20 bp, Artificial Sequence
  Primer
attatcctaagggtcgagac

SEQ ID NO: 241 - DNA, 20 bp, Artificial Sequence
  Primer
tggatgttatggcatgtaaa

SEQ ID NO: 242 - DNA, 20 bp, Artificial Sequence
  Primer
aaaggttgggcatagtggtc

SEQ ID NO: 243 - DNA, 20 bp, Artificial Sequence
  Primer
atggcatgtaaattatacct

SEQ ID NO: 244 - DNA, 20 bp, Artificial Sequence
  Primer
tgagtacattggaatatgct

SEQ ID NO: 245 - DNA, 20 bp, Artificial Sequence
  Primer
ccttccatgggcaatttaac

SEQ ID NO: 246 - DNA, 20 bp, Artificial Sequence
  Primer
acaagatgttccgtattcat

SEQ ID NO: 247 - DNA, 18 bp, Artificial Sequence
  Primer
ggtgacagtgcgagacct

SEQ ID NO: 248 - DNA, 20 bp, Artificial Sequence
  Primer
gtggtttttcttgggaagtc

SEQ ID NO: 249 - DNA, 20 bp, Artificial Sequence
  Primer
tcggcactggatataaagat

SEQ ID NO: 250 - DNA, 20 bp, Artificial Sequence
  Primer
tgtccttcccaaactgaatg

SEQ ID NO: 251 - DNA, 19 bp, Artificial Sequence
  Primer
ccgtcctctgttagctttc

SEQ ID NO: 252 - DNA, 20 bp, Artificial Sequence
  Primer
ctcttgcctaccctagttat

SEQ ID NO: 253 - DNA, 20 bp, Artificial Sequence
  Primer
cacacatgcttttcccctca

SEQ ID NO: 254 - DNA, 20 bp, Artificial Sequence
  Primer
cccaatatctgtattccttc

SEQ ID NO: 255 - DNA, 20 bp, Artificial Sequence
  Primer
aatgttggaaatgagtttgt

SEQ ID NO: 256 - DNA, 20 bp, Artificial Sequence
  Primer
gctgagatgggcagatcatg

SEQ ID NO: 257 - DNA, 20 bp, Artificial Sequence
  Primer
gaaggaaaaaatattagatc

SEQ ID NO: 258 - DNA, 20 bp, Artificial Sequence
  Primer
attttttccttcaagatttt

SEQ ID NO: 259 - DNA, 20 bp, Artificial Sequence
  Primer
cttaccctattcagctcctc

SEQ ID NO: 260 - DNA, 17 bp, Artificial Sequence
  Primer
ccaggccacattaacac

SEQ ID NO: 261 - DNA, 20 bp, Artificial Sequence
  Primer
ccaggagcaggagtagtttt

SEQ ID NO: 262 - DNA, 20 bp, Artificial Sequence
  Primer
gttaacctaccgggtaactt

SEQ ID NO: 263 - DNA, 20 bp, Artificial Sequence
  Primer
gctggcagcatcatgaagtt

SEQ ID NO: 264 - DNA, 20 bp, Artificial Sequence
  Primer
agtgagaaaaacatggatga

SEQ ID NO: 265 - DNA, 20 bp, Artificial Sequence
  Primer
tgtaaatctgacctgcaaaa

SEQ ID NO: 266 - DNA, 20 bp, Artificial Sequence
  Primer
aagaagttacccggtaggtt

SEQ ID NO: 267 - DNA, 20 bp, Artificial Sequence
  Primer
gtggcagtggcacaatctct

SEQ ID NO: 268 - DNA, 19 bp, Artificial Sequence
  Primer
gcccaagaaatttaacaat

SEQ ID NO: 269 - DNA, 20 bp, Artificial Sequence
  Primer
tggccaggctggaaaattta

SEQ ID NO: 270 - DNA, 20 bp, Artificial Sequence
  Primer
agggtcaggagccggagtca

SEQ ID NO: 271 - DNA, 20 bp, Artificial Sequence
  Primer
ttgtgcatggtagagagtat

SEQ ID NO: 272 - DNA, 20 bp, Artificial Sequence
  Primer
aggccatgctagaagtacat

SEQ ID NO: 273 - DNA, 20 bp, Artificial Sequence
  Primer
ggccttttgctttgagctgc

SEQ ID NO: 274 - DNA, 20 bp, Artificial Sequence
  Primer
cactaagccaagcactatac

SEQ ID NO: 275 - DNA, 16 bp, Artificial Sequence
  Primer
ctgcactcctggacga

SEQ ID NO: 276 - DNA, 20 bp, Artificial Sequence
  Primer
aatatgttaagggcttacag

SEQ ID NO: 277 - DNA, 20 bp, Artificial Sequence
  Primer
tgtagtctctcacagtgacg

SEQ ID NO: 278 - DNA, 20 bp, Artificial Sequence
  Primer
agcacttggatctctcacat

SEQ ID NO: 279 - DNA, 20 bp, Artificial Sequence
  Primer
gtagacacattttctggaat

SEQ ID NO: 280 - DNA, 20 bp, Artificial Sequence
  Primer
atgttgccactgtactccaa

SEQ ID NO: 281 - DNA, 19 bp, Artificial Sequence
  Primer
tatccatgccatcctagaa

SEQ ID NO: 282 - DNA, 20 bp, Artificial Sequence
  Primer
atgttgccactgtactccaa

SEQ ID NO: 283 - DNA, 20 bp, Artificial Sequence
  Primer
aaagaatggagaatggaaat

SEQ ID NO: 284 - DNA, 20 bp, Artificial Sequence
  Primer
tgtgaatgtttagctaccaa

SEQ ID NO: 285 - DNA, 20 bp, Artificial Sequence
  Primer
tctgcatggggttctagatg

SEQ ID NO: 286 - DNA, 20 bp, Artificial Sequence
  Primer
tatccccaactgtggtgtct

SEQ ID NO: 287 - DNA, 20 bp, Artificial Sequence
  Primer
cccaagtccgctaaacaaca

SEQ ID NO: 288 - DNA, 20 bp, Artificial Sequence
  Primer
aagaaaataccatttgttcc

SEQ ID NO: 289 - DNA, 20 bp, Artificial Sequence
  Primer
cggccactgtcaatgaagtc

SEQ ID NO: 290 - DNA, 20 bp, Artificial Sequence
  Primer
catagcgagatcacgtctct

SEQ ID NO: 291 - DNA, 19 bp, Artificial Sequence
  Primer
gccaaaccctgctctagtt

SEQ ID NO: 292 - DNA, 20 bp, Artificial Sequence
  Primer
agcccaggaggttgaagctg

SEQ ID NO: 293 - DNA, 20 bp, Artificial Sequence
  Primer
ttctcacctatggacaatac

SEQ ID NO: 294 - DNA, 20 bp, Artificial Sequence
  Primer
agagcacaaatacgcaatga

SEQ ID NO: 295 - DNA, 20 bp, Artificial Sequence
  Primer
tacacagaggaattatttgt

SEQ ID NO: 296 - DNA, 20 bp, Artificial Sequence
  Primer
agtctcttcacttcccacac

SEQ ID NO: 297 - DNA, 20 bp, Artificial Sequence
  Primer
ttcctccaaagcacagaatc

SEQ ID NO: 298 - DNA, 21 bp, Artificial Sequence
  Primer
gaagatttactaagatcacgg

SEQ ID NO: 299 - DNA, 22 bp, Artificial Sequence
  Primer
ttttgaaatctattcttagcca

SEQ ID NO: 300 - DNA, 20 bp, Artificial Sequence
  Primer
taactccttttagagcttat

SEQ ID NO: 301 - DNA, 21 bp, Artificial Sequence
  Primer
gaagatttactaagatcacgg

SEQ ID NO: 302 - DNA, 20 bp, Artificial Sequence
  Primer
aatgagaggcggggtaagat

SEQ ID NO: 303 - DNA, 22 bp, Artificial Sequence
  Primer
ttttgaaatctattcttagcca

SEQ ID NO: 304 - DNA, 20 bp, Artificial Sequence
  Primer
ctcttatctaatgtccgtta

SEQ ID NO: 305 - DNA, 20 bp, Artificial Sequence
  Primer
aacggacattagataagagg

SEQ ID NO: 306 - DNA, 18 bp, Artificial Sequence
  Primer
tgtagtcccagctacctg

SEQ ID NO: 307 - DNA, 20 bp, Artificial Sequence
  Primer
atggcaatagtctatgacaa

SEQ ID NO: 308 - DNA, 20 bp, Artificial Sequence
  Primer
gggcaacagagtgagacttg

SEQ ID NO: 309 - DNA, 22 bp, Artificial Sequence
  Primer
ttatggaaaaggtaagggaaaa

SEQ ID NO: 310 - DNA, 20 bp, Artificial Sequence
  Primer
gcaatggcaggacctaattt

SEQ ID NO: 311 - DNA, 20 bp, Artificial Sequence
  Primer
tcataaattcctccctgtct

SEQ ID NO: 312 - DNA, 20 bp, Artificial Sequence
  Primer
aaaacagttacaggccgagc

SEQ ID NO: 313 - DNA, 20 bp, Artificial Sequence
  Primer
cagcctgggcaacatagtat

SEQ ID NO: 314 - DNA, 19 bp, Artificial Sequence
  Primer
ctaagtccaagggcttaaa

SEQ ID NO: 315 - DNA, 20 bp, Artificial Sequence
  Primer
gcctgggcaacatagtatat

SEQ ID NO: 316 - DNA, 20 bp, Artificial Sequence
  Primer
attaatgagaggcggggtaa

SEQ ID NO: 317 - DNA, 20 bp, Artificial Sequence
  Primer
ttagttgcaaacaatgtctg

SEQ ID NO: 318 - DNA, 20 bp, Artificial Sequence
  Primer
tacctttaacggacattaga

SEQ ID NO: 319 - DNA, 22 bp, Artificial Sequence
  Primer
aatgagaggcggggtaagattg

SEQ ID NO: 320 - DNA, 20 bp, Artificial Sequence
  Primer
gaaaaggaaacagcctgagc

SEQ ID NO: 321 - DNA, 20 bp, Artificial Sequence
  Primer
ttaccatctctgaggatata

SEQ ID NO: 322 - DNA, 19 bp, Artificial Sequence
  Primer
agagacaattccggtaaat

SEQ ID NO: 323 - DNA, 20 bp, Artificial Sequence
  Primer
ttatgggcagagataggttc

SEQ ID NO: 324 - DNA, 20 bp, Artificial Sequence
  Primer
tcttaccccgcctctcatta

SEQ ID NO: 325 - DNA, 20 bp, Artificial Sequence
  Primer
ccccttatcaatatcagatt

SEQ ID NO: 326 - DNA, 20 bp, Artificial Sequence
  Primer
tgggcattgggttatactca

SEQ ID NO: 327 - DNA, 20 bp, Artificial Sequence
  Primer
agtatactgccccagaactg

SEQ ID NO: 328 - DNA, 20 bp, Artificial Sequence
  Primer
tgatgagaaccactaccctg

SEQ ID NO: 329 - DNA, 20 bp, Artificial Sequence
  Primer
tttaacagagacgaggtttt

SEQ ID NO: 330 - DNA, 20 bp, Artificial Sequence
  Primer
aagaaggcatttggcgctac

SEQ ID NO: 331 - DNA, 22 bp, Artificial Sequence
  Primer
tttgcctataacccagagaact

SEQ ID NO: 332 - DNA, 20 bp, Artificial Sequence
  Primer
aagtgagccgaggagaaagc

SEQ ID NO: 333 - DNA, 20 bp, Artificial Sequence
  Primer
acttggttacaaagagcaga

SEQ ID NO: 334 - DNA, 22 bp, Artificial Sequence
  Primer
ctgcgagcccagatcaaccttt

SEQ ID NO: 335 - DNA, 20 bp, Artificial Sequence
  Primer
atgaaacccaatttaataca

SEQ ID NO: 336 - DNA, 22 bp, Artificial Sequence
  Primer
aatctatacacaaggctcaagt

SEQ ID NO: 337 - DNA, 20 bp, Artificial Sequence
  Primer
gtggcaaaacctcgtctctg

SEQ ID NO: 338 - DNA, 20 bp, Artificial Sequence
  Primer
gcccggctaatttttaacag

SEQ ID NO: 339 - DNA, 20 bp, Artificial Sequence
  Primer
ggcaacagagcaagactcgg

SEQ ID NO: 340 - DNA, 20 bp, Artificial Sequence
  Primer
ctgggctcgcagaggtaatc

SEQ ID NO: 341 - DNA, 18 bp, Artificial Sequence
  Primer
cgagcccagatcaacctt

SEQ ID NO: 342 - DNA, 20 bp, Artificial Sequence
  Primer
ccgaggagaaagcgaaatag

SEQ ID NO: 343 - DNA, 18 bp, Artificial Sequence
  Primer
cgagcccagatcaacctt

SEQ ID NO: 344 - DNA, 20 bp, Artificial Sequence
  Primer
ccgaggagaaagcgaaatag

SEQ ID NO: 345 - DNA, 22 bp, Artificial Sequence
  Primer
cgtggcaaaacctcgtctctgt

SEQ ID NO: 346 - DNA, 22 bp, Artificial Sequence
  Primer
aaacatgagatggtcctttcta

SEQ ID NO: 347 - DNA, 63824 bp, Homo sapiens
  misc_feature (1)...(14): N is unknown
  misc_feature (22880)...(22970): N is unknown
  misc_feature (39442)...(39541): N is unknown
  misc_feature (53423)...(53522): N is unknown
  misc_feature 57620,57642: N is unknown
  misc_feature (57652)...(57751): N is unknown
nnnnnnnnnnnnnntcccagcactttgggaggccgaggcgggtggatcatctgaggtcaggagttcgagaccagcctggccaacatggtgaaaccacatctctactgaaaatacaaatattagccgggcgtggtggcacgcacctgtaatcccagctactcgggggctgaagcagcagaatcgcttgaacctgcgaggcggaggttgcaatgagccgagatcgcgccactgcactccagcctgggtgacaagagcaagactccgtctctcacacacacacacacacacacacacacacaaagactattctggtctctgcctccgggatggcggctcgctttggacctctcttctgtgcttctactgccctctcttacaattctctaataattataatcatggcgagtgcttaccatatattccaatctatttacttccacaagctcattaattctcaccctaaccctctgagatggttactattatttcctctctgcagctgagggaattttgggctagggacgttatgtaagttgagccacgctacgctaaaagttccacactcaattctagcgtctcggctctggactaccaagttccggagcaagcagacagaccacctctttacgttcccgtaggccacgctccgggggcggggctccagtgaggatactgcatcccatggtgccttgcgcgccagcgcagccattggtccggctactctgtctctttttcaaattgaggcgccgagtcgttgcttagtttctggggattcgggcggagacgagattagtgatttggcggctccgactggcgcgggacaaacgccacggccagagtaccgggtagagagcggggacgccgacctgcgtgcgtcggtcctccaggccacgccagcgcccgagagggaccagggagactccggcccctgtcggccgccaagcccctccgcccctcacagcgcccaggtccgcggccgggccttgattttttggcggggaccgtcatggcgtcgcagccaaattcgtctgcgaagaagaaagaggagaaggggaagaacatccaggtggtggtgagatgcaggtagggagagggctgacaggattccgagcgctgcggcttcgctgctgggccccctactgcgcggtccagggagagggattttatttgcatttcctgagggtcccagtttcttggttctccgcgttctgttcaataaaaatgacacccggttgctgtgtgtatgtggtttttaggagaaaataacatgtttgatttgatcactgttccatactgaaaagtgcgttcttatgtttaaactatagtcaataaagatgtaggtgtcacttttatatgctacttcatgtagtttgtcagtttggaagtaagactgaatacctattttgcagatggttaagcacttacgttggtattattacctctaaaaagcaatcaatcactgttctctttattctagatgcaatattttctgcatccctactaaacaagtaaacatctctgtctttaaacattaaaaattaataaagtgagtttatgttttttaaaagatcaagacaagttaagctagtgtaaatttctgattgtgctgcagttttccctttcatctgcgtgtttgttcatagaccaaactaaacggatatttcgagataaagggatgtggaggggtgttcggccctcccctgactggtttccaaataacttcccaattttaaaataagctagaaactgctgcttagttagaattgatttattcaactttttagaggctctccacagtttactgagtatgtgtgttttgtgtgtccgtttttgtggctgttaacagttgctgttgcaacttttctgtaaaccccaaagtattctaaaattaaaaggttattttttagaaaaacttgtatcaacaaactttcttaggctattgtttactcagccctggtaacttgaattgtggatatcgaaggtgatgactaggtttctaaacaaggtgtcagagaggaaattgggtggcaatcttaagtctagccagtgacacttactagttgttgtactctggggcttctgttagtagttagttgtttgaagatttttatttaaaaatgcagtgcatataacaagtgcaaattttaaaattattttggttgtttaataaaaccaggcaatattaccttttccgtatgcatttatttaatttcttttttaatgttagttacaaaatatttcagacttacaaaaagttattaagaacaatgtaataaacatttgtatattcatcacccagattaagaaacaaaacaatcattgctggagccccccttttccctctccatcccttttcctccagccactgttaaccattatcttgaacttgatgtttatgatccgtatacatttcaagtcttagaagagatttactttatcaccaatgaatagaatagttctttgcttgtgtctaatatttacaataatttttgtgtaaagagattttttttttcagattagcctttttctttcaaatagccttcctggtgcgtctgtcattaagcattaagctttagtaaataggcaacttatgagttgcgaggtcctcaggggttggtaagccttttctgtaaagggcccagagaaataaatatttattttatttaaatactttaggctttgcagatcacatgtggtttatcagttttttttgagacggagtctcgctctcttaggccgtagtgcagtggtgcaatctcagctcactgcaacctccgcctcccggattcaagcaattttcccacttcagcctctcaggtagctgggattacaggcgcacaccgccatgcctggctaatttttgtatttttagtagagatggggtttcaccatgttggccaggctggtctcgaactcctgacctcagagaatccacccaccttggcctcccaaagtgctgggattataggcgtgagctactgtacccctttacatgtggtttctgtcacattattttctgatctttttttttttaagaacactttaaaactgtaaaaatcattcttaaatctgtcagggcaggggccaggtttgacccacaggttaaagtttacagatccctacataatgcgctactggttctctttcttatgtccctcctattccatcccctatttttttcccaatttaaaaagtcattttcaaacacacataatataaaatttaacatcttaaccacttttaagtgtacagttcagtgatattaaatacataatattctgcaacaattactaccatccatctccataactcttttcatcatgaaaaactgaaactctatacacattaaacaataactccccatttccctctcccatcaacccgacacctaccattcgactgtcttatgattttgactactctaagtacttcataaagtggagtcataatacagtatttatccttttgtgacttgctcattccacttaggcataatgtcctccaggttggaccatgttgtagcaaatgtcagggttttcttcctttttaaggctgcatagtatttattatatgtatataccacattttgcttgtcccttcatatgtcaatggatacttgagttacttctttttttgttgttgttgtttttgagaccgagtctcgctctgttgcccaggctggagtgcagtggcgcggtcttggctcacactgcaagctccatctcccgggttcacgccattctcctgcctcagcctcccaaggagctgggactacaggcgcctgccatctctcccggctaattttttgtatttttagtagagacggggtttcaccatattagccaggatggtctccatctcctgaccttgtgatctgcccgccttggcctccctaagagccgggattacaggcgtgagctacggagcccggccttgagttacttcttacttttagctattatgaataatgttgctatgaatatgggttttcaattcttttgggtatttacccagaattgtaattgctggatcatatgataattctattttaaagtttttgaggaaccgacaaactattttccacagtggctggaccattttacattcctaccaacagtgcataagggttccaatttctccacatcctcaccaacgtttattttctgtttcttttttttttttcaagtagccatccattgggtgtgaggtgctatctcattgtagttttgatttgtatttccctaatgattaatgatgttgagcatcttttcatgtgtttactggccattttgtgtatctttggagaaatgtctgtttaagtcctttgcccatttttaaattggtttgcttttttgttgttgagttttaggaattttctatatattttggatattttcagatacataaacggcaaaaattttttccccattactgtggtttgcctttttactcattgataccgtgtggtcttttcctttctttttctttttggaaccagtgcatggcctctttgttgattctgtgtttggccccagtgcagcctgttctgtgctatgtgtctgcagtgctgaaaccaggcctacccagcaccatacagaagtccaggctgtagataccaatgcatgggtcacatttgatacccaaatctgtgtgttcctggatctccaaaccaaagtttccagtatctgagaagttgttctttcttgattcacactcctgcatctttagacctttcttcagggtttcttctgctttggccctttgtgcagtgggtggcaatcttcacttctcctgatgccaaaggatctgacaatgtatttgactttggagaacacaggggtctggcctatgagctgctccaacaccttggctgctggggtcagtcatctccagtctcctccatacagatgttgagacagaaaatcgttctgtcacccaggctggagtgcagtggcacagtctcggctcactgtaacctctgcctgtcaggttcaagcaattcttatgcttcagcctcccaagtatctgggattacaggtgtgcaccaccatgcctggctaattttttgtatttttagtagagatggggtttcgccttgttggccaggctggtcttgaactactggcctcaagtgatccacccattttggcctcccaaagtgctgggattatgagtgtgagccctcatctggccagagttctcttttttttaccttgatcttgcactatgatggagaaaaggaagataaagtctttttttttcccttgggtttgtttgtttgtttgtttgtttgttttttgagacggaattttgctctcgttgcctaggctggagtgcattggtacgatcttggcttactgcaacctccgcctcctgggttcaagccattttcctgcctcagcctctagagtagctgggattacaggcatgcgccaccacgcctggctaattttgtatttttagtagagatggggtttcaccatgttggtcaggctggtcttgatctcctgatctcaggtgatccgtccaccctggcctcccaaagtactgggattacaggcgtgagcccgtgcctgggctattttttttttctcccctttaaatatagtatcttgctttattgcccagacttgttgtgaactcctggactcaaatagtcctcctacctcagccttccaggtagctgggatcacagggatgctgtcttttgatacacaaacattttaaatttttatgaagtccagtttgtctttttgtttttgttccctgtatctttggtgttatatccaagaaatcattgccaaatccattgttgtgaagcttttgccttatgttttcttctaagagttttatagctttaggtcttacatacatttttgatccattttgagttaatatttgtatattgtgttagataagggtccaacctcattcttttgcatatggatatttagtttcccagcaccatttggtgaaaagcttgtctttttctgattgaatggtcttggcaaccttattaaaaatcatttgctcatatgtaagagggcttatttctaagtgctgttatgttccattggtctataagtctgtctttatgtcagtaccacatggttttgattattgcagctttgtagtaagttttgaaatcaggaagtgtgagtcctccagctttgttctttttcaagattgttttggctatctggactcccttgggattccatatgaatttgaggatgaatttttctatttttgtaaaacacgtcattgggattttaatagggattacattgaatctatagatcactttgggtagtattggcatcttaacaatattaagtctttcagttcatgaacaagggatgtgtttccatttatttatgccccttaatttctgccagcagtttttttttgtttgtttttgttttgagatggagtttcgctcttgttgtccaggctggagtgcagtggcacaatcttagctcattgcaacctccacctcccgagttcaagtgattctcctgcctcagcctcctgagtagctgggattacaggtatgtggcaccacgaccagctaatttttgtatttttactagagacaaagtttcaccatgttggtcaggctggtcacgaactcttgacctcaggtgatccacccaccttggcctcccaaagtgctgggattataggcgtgagccactgcgcctggcctcagcagtgttttatagttttcattttataagtctttcacctccttggttaaattaattactaatattttattctttttggtgctattttaaattgagttgtttttgtaatttcctttttagattgttcattcttagtgtataaaaatgtaactggaggctggacgcagtggctctcacctgttatcccagcactttgggaggcaaggtgggcctcccaactcctgatcacgagatcaggagttcaaggccagcctggccaacatagtgaaaccctgtctctactaaaaatacaaaaattagccatgcatcgtggcgcgtgcctgtagtcccagctacttaggaggctgaggcaggagaatcgcttgaacctggaaggtggaggttgtggtgagccaagatcgtgccactgtactccagcctgggcaacagagtgagactctgtctcaaaaaaaaaaaaaaagaaaaaagaaacgtcgctggattttgcttgttgactttctatccagctactttgctgaattcacttattagttctaacagtttttttttgtgtgtgtgtaattttagagttttcttttctttttttttttttgagatggagtctcgctttgttgccaggctggagtgcagtggcgcgatctcggctcactgcaacctctacctcccaggttcaagcaattctcctgcctcagcctcccgagtagctgggactacaggcacacgctacgacgcccagctaatttttgtatttttagtagagacggggtttcaccatgttggccaggatggtctcgatctcttgacctcgtgatccacctgcctcagcctcccaaagttctgggattacagccgtgagccactgtgcctggcttttttttttttttaattaactattgaacttctgtttattattattattattatttatttatttattattttttgagatgaaatctcggtctgttgcccaggcgggagtgcagtggtgtgatctcggctcactgcaacctccgcctcccgggttcaagcaattctgtgcctcagcctccggagtagctgggattataggcgctcgccaccatgcccggccaatttttgtatttttagtagagatagggtttcatcatgttggtcaggctggtcttgaactcctgacctcgtgatccgcccgcttcggcctcccaaagtgttgggattacaggcgtgagccactgcacttggccttatttttattatttttttcatcaacttttaagttctggggtacatgtgcatgatgtgcaggtttatcacataggtaaacctgtgccatcacagtttgctgcacagatcaacccatcacctagctattaagcccagcatccactagctattcttcttgatgctctagctccttttgccccactgaattttagggttttctttcttttctatttttttttcttttgagacagactctcgctctgtcaccaggctggagtgcagtggcacaatcttggctcattgcaacctctgcctcctgggttcaagcgattctcctgcctcagcctcccgagtagctgggactacaggcatgcgcccatgcctagctaagtttttgtagttttagtagagacagggtttcactatgttggcaaggctggtctcaaactcctgacctcaagtccccttggggttcctgaagtactgggattataggtgtgagccaccacgcccggccagattttctatataaaagatcatataatctgcagacagataattttactttttccttttctttctttttttctttttttgagatggagtctcgctctgtcgcccaggctggagcgcggtggcgccatctctgcttactgttacctctgcctcctgggttcaagcagttctctgcctcagcctcccaagtagctgggattacatgcacatgccaccacgcccagctaatttttgtatttttagtagagatgggagttcatcatcttggctaggctggtcttgaactcctgacctcgtgatccatccgccttggcctcccaaagtgctgggattacaggcatgagccaccgctcttggccctcaaccttttccttttcaatttggatgccttttatttttatttttcttccttttttttttgagatggagtctcgctctgttgcccaggctggaatgcagtggtgcaatctctgctcactgcaacctacgcctcctgggttcaaacgattctcctgcctcagccttccgagtagcttgtactacaggcatgtgccaccataaacagctaattttttttttttctcgtatttttagtagagacggggtttcgccgttttagccaggctggtctcgatctcctgacctcgcgatccgcctgcctcagccttccaaagtgctgggattacaggcgtgagccaccatgcccggcccttgtttttctttcttgcctaattactctagctagaacttacagtattatgtcgaatggaagtggcaaaagtgggcattgggcatccttgtcttgctcctgttcttttatttgttagtttgtttgagatcctcctgcctcagtttcctgagtagctgggactatagacacactactacacccagctaattaaaaaaataattttttttttttttttagagatggggtctcgctatgtttcccatgctgatcctgaactcctggcttcgggtgatcctctactcttaccctcccatagtgctgtgattacaggcatgaaccactgtgctggccctgttcttgtttttagaggaacattcttcagtctttgaccatcaattatgtttgctgtgggtttttcatatgttgcttttattttgttgaggtagtttcactctattcctagtttgttgagcatttttatgactaatgggttttgaattttgtcacatgcttttcctgcatcgattgacatgattctgtggtttccttcattctgttaatgtggtatattacattgatcaatttttacatgttggaccatccctgtattccaggaataaatcccacttggtcatggtgtataatccttgtgctgctcagttcaatgtgttggtattttgttgaggatttttttttatcagtgttcataagggatagtgatctgtagttttcttgtagttgcctttgtctggctttggtatcagggtaatgcttgcctcacaaaatgagttgggaagtgttctctcctttgccagattttttctgggaaaagattgagaagaactggtattagatcttcttgaaatgttttatagaattcacctatgaaactatcagatctagggcttttctttgtcaggagatttttggttagtgagtccatctctttactggttatagctccattcagaatttccatttctttgtgatttagtctttgtaagtattgtgtttctaggaatttgttcagctgggttatccgatttgttggcatacaattgttgaaaatactctttcaacaataagagagaagacacaaataactagttcttttgtttccagttccttaagttgtaaagttagggtgttgatatgagatctttcttgctttttaatgtaagcattcatagctataaatttcccccttagcactgcttttgctgtgtcccgtaagttttggtatgttgtattttcattttcattaatctctaaaattttctaattttccttgtgatgtctttgaaccctggttacttaaacacacacacacacacacgtgtgtgtgtgtgtgtgtgtgtgtgtgtgtggttttttgtttgttttgagactgagtttcgctcttgttgcccaggctggggtgcaatggcgcgatctcggctcactgcaacctctgcctcccggttcaagcgattctcctgtctcagcctccagagtagctgggattacaggcgcctgccaccacgcctggctaatttcacacacacatttaaaaaatacatctacctgcttttacttcagaatctttgcaatttctgttctctctgcctgaaaattttttccaccaaaatatctacagggcctggctcccttgctttttaggttctgcttaaatatcacctgcgtagaagcattccctaactaccctaaaatagcaaccaactatcttccaccctcaacacttcctatcccccttaaactgctttcttttcttttctttttttttttttttttttgagacagagtctcgctctgttgcccaggcctggagtgcagtggcgcattcttggctcaccgcaacctccacttcagcctcccaagtagctgggactgtaggtggctgccaccatgcctggctaatttttttttttttgagatggagtctcactctttcacccaggctggagtgtagtggcacagtctcggctcactgcagcctccatctcccaggttcaagtgatttctggctaatttttgtatttttagtagagatgaggtttcaccatattggccagggctagtttcgaacttctgacctcaagtgatctgcccaccttggcctcccaaagtgctaggattacaggtgtgagccactgtgcctggcctaatttttgtatttttaatagtgatgggtttttactatgttggccaggctgatctcaaactcctgacctcaagtgattcacccacctcagcttcccaaagtgctgagattacaggcgtgagccactgtgcctggcctgctttattttcatttctaatttatcagcatctaatatatttattcattttatagtcatctcttccttcaactaagttaaaagctccctgagcacaggattttggtgtttttttctttcctttaactttgtattgttcattgctgtatctccagtgtctagaaaattacctatcacatagtaagtacttgatgaatatttgtggaatgagttaatttagcacttctccacaggataggacttaggtttttttaatcctcaatctcccttccctcaccattttgattgtttgaatttttatataactatggtgaagccaacaaattgatggatttgttagtgtgagcagccgaaactttgcaatttctaataagttagagaagtctgggtaggaaactaatgacttggcagtactctttcttagagtacacatagtccctaaagcttctctgagaattttgataactttgaggaatgtgtgatctgtatgaatttcctatcacttagtcctgacaatgtgaatggtattcatttggtaacttaattttatacgtccaggcaagatactagtttaggggatgccaaaaataatagactaattggaaaagctttagccacatgagagcaattcactccacttgatgctcttggcctacctcagtataagttggttctaccttagttttgttgaagttttaataatactgtacattcatgttggttatatgcattgtgtaagttttagtatagttggcaaatgaaagcattaccagatactacctgggagttaagtttcctaggatcacagatttggtcttctgatcacttggaagtatacttagagtgggctgtgccaggggaagttgaggtatccttcttaaataagtagcaacttggtttatctagtgataagggggaaataatttcctgtttggcactttctccaaaatatatgatactcaatgggaaaaatgaactcaggtcaagattatgtctctccctttggcccagacatgtattgagtatataattgtcttattgatgctactctgtggactgtgatattagttttcccataattcctcttaggatgacatttattaggcaatgtagtttaacagatatttaagaacctactgtgtgctaagcatggtagttgttgctggggaaacagtaaactagacagtatttctttctgtagtgatctgaggtttagtgggtaacacattaaaaaaaaaagataagagaggtgatgtttagaaaaggtgtataaagggtgctgtaggaatatatagcagacatttaatgtggtcttggttggagcaggtgggggaggcacataggatagaaaggacttcctgaggaaataatcatttcaactaaatacctactcaggcatttccgtagaatgaggactcttgatccagtcggcagtgtagaccttctgtgtctattcactcatttaaaaatggggctaataatattaccaacctcacagtgttgtgtggacaaactgagtgagcacaatgcaaagcacttgaaacaataagtacctggcacatagtaagtactcaacttattagtcattatttttatgtactttttattttgtgccaggtatctactggcagattagtattttgaacacaaatttgacatgtttttttctactacatcataacctaatttgatcggatttttttttttttttttttttgagacggagtttcgctcttgttgcccaggctggagtgcaatggcgcgatcttggctcaccgcaacctccacctcccaggttcaagcaattctcctgcctcagcctcccgagtagcagggattacaggcatgcaccaccatgcccagctacttttgtatttttaatagagacagagtttctgcatgttggtcaggctggtctcgaactcccgacctcaggtgatccgcctgcctcggcctcccaaagtgctgggattacaggcgtgagccactgcgcccagccttgatcagattttaagaataggagaaatggaattctgaaaaataagtttggcatttttacaagttaaaacctgttagtggctgggcacagtgtctcacttctgtaatactagcaccttgggaagctgaggtgggataatcacttgagcccggaagtttgagaccagcctgtgcaacacagcaagaccccatctctaccatcaaaacaaaacaaatctattcgtatctgctctaagaagctgccagaattgtaatgtcttaacatatctttgaacatttaaaaaattatatttgtgaaacttgagacacttataattttactgtctgctttagcaatatcacttagtcctgatttaatctccatcaccaacaatgtggtcaaaatttcgcatttttcttgacaaatgtagttagtgaaaatgtcattgataacctgagaactaagagctcttgaatgactttgtgtatttctttttatagaccatttaatttggcagagcggaaagctagcgcccattcaatagtagaatgtgatcctgtacgaaaagaagttagtgtacgaactggaggattggctgacaagagctcaaggaaaacatacacttttgatatggtaacatatggtgcaatttctttattatccactaatgtaaaataattttaatatacatattttacctggaaaatggtgtatacttagaaatttcagttgtctctgaattgtcagatggcttctagtgggctgaattatgaattagttaacatacgaaaaacaaaattattaaaatgagtaattttgaggttgatttttttttttttaatttttttcgttaggtgtttggagcatctactaaacagattgatgtttaccgaagtgttgtttgtccaattctggatgaagttattatgggctataattgcactatctttgcgtaagtaaaagggtgttttttctgatttatgaaaaagcttaaatgcttgtgttttttgttgttgtttgtttgttttttgagacggagtttcactcttgttgcccaggctggagtgcaatggcgcgatctcggctcactgcagcctctgcctcctgggttcaagcaattctcctgtttcagcctcccaagtagctgggattacagctgcctgccaccatgcccgctaatttttgtatttttagtagagacgtggtttcactgtgttggccaggctggtctcgaactccggacctcaggtgatccgcccacctcggcctcccaaagtgttgggattataggcttgagccactgtgcctggcttgttttttgtttttctagtctatcactaagagtcatatgggtgcatgtttctttttgatttaacacttgttaatctttacaggtatggccaaactggcactggaaaaacttttacaatggaaggtgaaaggtcacctaatgaagagtatacctgggaagaggtatttattgtttataacatacttttatctctaatgtgactgaaatttaactgtataaaacttgtttgagggcctctgtcttggaatagagatcagagtacctatgtcaaaatgaacttaggataaaccactactacagtaaaattaaagtgcatggtatgactcctgtttaagaaacagcctcaatggaagaggaaggaccaatatatatggcacagttatatgataaaagaggagtctatttatgacagaatggttggagcagaatattgtagaaaagttggaatatgagtgaagcttgaaggcagggagggctttgtattgaaggaatgggtctcagaaagttagcatggccaggggaagtatagtactttattcatgatgatcctaagtgttcaagaaattaagatgaatgtattgtttaatattgcagaaagcatatactatgttttacaaagatttccatgaatttaagtgagtttaataactaagagagagaaccaatactggaagaaagttgaaagaagaccaagacaagttgaactagagctgaagtgttaaaacttttaaaaaaaagtttagttttaaatttagtaatgtgtttaaatttaaatgagtttaataactagttaattggtcgggcacggtggctcatgcctgtaatcctagcactttgggaggctgaggcgggcagatcacctgaggtcagcagttcgagaccagcctggccaacatggtgaaacccggtctctactaaaaatacaaaaattagctgggtgtggtggtgcatacgtgtaatcccagctacctgagaacgagactctgtctcaaaaaaaaacaaaaaaacaaaaaaccaaaaaactagttaatttaaaaaaaaaaagaattttttttaatttttttttttttttttaaattttaaagtgatggggtcccactgtgttccccaggccagtcttgaactcttgggcttcaggagtcctcccacttcagcctcctgagtagctgggattagaggcacatactaccttgcccagctaattttccaaattattgacagttgggtagaacctttcttctagtggttacataattgagtcattaacttactttacatatatagataataaagttatgaaattgttaccataggagatatggaataggcttaaagcatagtttcgctgggcagaattattgaacttggcgttttttttttgagacggagtctcgctctgtcgcccaggctggagtacagtggctcgatcttggctcactgcaacctccacctcccgggttcaagtgattctcctgcctcagcctcctgagtagctgggactacaggtacataccaccaagtccggctaatttttgtatttttagtagagatggggtttcaccgtgttggccgggatggtcttgatctcctgaccttgtgatccacctgccttgacctcccaaagtgctgggattataggcgtgagccaccgtgcctggccgaacttggctttttaagtagataggttccattggtttctatgtaatgctcagggatgaagatggctaagaagtgtgacaggtttatggagggtgtgaagactactgtagaacagactgttgtaaatgacttctctaacattaggttagttgtttctttttttgttttgttttaacttgctttgccatacttatgtttaaatatattataaaggaggcccatgtattttaactgccacagtaaatggcattcttcctttatattagtccttattataatttcaggatcccttggctggtataattccacgtacccttcatcaaatttttgagaaacttactgataatggtactgaattttcagtcaaagtgtctctgttggagatctataatgaagagctttttgatcttcttaatccatcatctgatgtttctgagagactacagatgtttgatgatccccgtaacaaggtaattcagtctttgagaatgaaatgtctctgaattttaatgtgtgaggctttgagaagtcagagagagagagagagagagagagagagagagagagagtgtgtgtgtgtgtgtgtgtgtgtgtgtgtgtgtgtgtgttttaaccaatctaatggatgttcttttggtattttggtcagagaggagtgataattaaaggtttagaagaaattacagtacacaacaaggatgaagtctatcaaattttagaaaagggggcagcaaaaaggacaactgcagctactctgatgaatgcatactctaggtaagaaagccatagtctcttccctagccccattttcttttaagaagaattaggaacttggagaaagtcaaattggggtgggtcagggtatgtgggtcacgtacctagagtttgtgttataaggaggggtcattggtaattggcttgagatttatatggaaggaaccaatattggaagaatgttgaaaggagaacaaagataagttgaaccatagctgaagtattaaacttttttttcttttttgagacgaattttcgctcttgttacccaggctggagtgcagtggcgcgatcttgactcactgcaacctctgcccaccgggttgaagcaattctcctgcctcagcctcttgagtagctgggattacaggtgtctgccactacgcccagctaatttttgtatttttggtagagatgtggtttcaccatgttggccaggctggtctcgaactcctgacctcaggtgaaccacctgccttggcctcccaaagtgctgagattacacgtgtgagccacggcgcccggcctaaacttttttaaagtagaagaatccttttattctagtaacatgatatatggaagcccaggataaaatgtggctgctatagttgattttggaatgggacgctctgaggcttacctccttagccttatgaaggggtccctgaggcacttttgtggagccccctactgatattagaatatagtttgaaaacccttgcattgaataaggattagaagttaggtcttttaaaatggctttattttagtgtgggagacagatggtcactaacactggctttcatggggtgaaagggatgatttttttcgctctaaatatcttttaccgaaatataaaattcctttttaaaaaattgtttattttcctctcttaccactctattcattgagatataaaatccctgtcataaatttacgtaagttagaaactccttttttcttgtaaagacccgtacaggacaaattccaaattctacagatatagtttactaaaacagaagtggtttttttgtgtgtgtgtgtggtctttaaacctcagaatgtaatagaaaaagcaatggattgcaattagatatttgcgtgtagtctcagtttcgcggttaattcagtatgtgactttttgtaaataagtgaatttatctgcttatcagtttctctgagctacaaaattattgttaggattagaagtcttatttcttttctggcttgtagttgaaaatttctataaaatgccataacaattacagttgcaactctaaaaaagtttgcatttaaagaaagaagaaaaatataacataaaagtgattaagatcatggaattttggatgatttcaaaattttaattaaattttcacttaatggctttccaataaaatggaaattttattctgtggttgattataacttaatttcatgtagaattttgagaactgaactaaagactaggtaaaatttctttaggtacatttcactaaagtataaaatttctatttttccttttttcttgtatgtagacttgtataaaggtcactttttatgaaggtatgtgacaaagaggagaagctaattaattcagttttcccaaattagagctaacttcaatgcttatttgtattaattgcctaatctggattaggaatgggtagataatggtagaaaaacatgagatgaatagtattattattattattattatttttgagacagagcctctctctgtcccccaggctggagtgaagtgatgcgatctcggctcactgcaagctctgcctcccgggttcacgccattctcctgcctcagcctcctgagtagctgggactacaggtgcccaccaccacgcctggctaattttttgtatttttagtagagacggggtttcactgtgttagccaggttggtctcgatctcctgacctcgtgatccgtccacctcggcttcccaaagtgattacaggcgtgaggcaccatgcccggtggagatgaatattataattcagatctatagtttacatttatgtttttccttaggtcttcctccttttctgtaattttaaataatttaaataattttataaaaatgatacttggctgggcgcgatggctgacgcttgtaatcccagcactttcggaggccaaggtgggtggatcacttgaggtccggagttcaagaccagcctggccaacgtggtaaaccccgtctctactaaaaatacaaaaattagcttggtgtggtggcgtgtgcctgtaatcccagatactcggtaggctgaggcaggagaactgcttgaacccaggaggcagaagtttcagtgagctgagatcatgccattgcactctagcctgggcaataagtctcaaataaataaataattaaaaaagatacttaattttttttttaagtaacatgaaagtacaaagaagaaaattgaaacttaccagattctctgtcaattgtcagtgatattaacaaacataataatgttcaccaaatgccattggatacagaaagaatgtctttggtcatctgtataattttttttccccctaagataaaaagcacagtatttgttttgttttttgtttttttgtttgcttgtttgtttttttgtgatttttttttttgagacagcgtctcactttgtcacccaggctggagtgcagtaactcaatcatggcttactgcagccttgacctcctgggctaaagtgatcctcccacctgagcctccagggtagctggaactgtaggagcgtgccaccacgcccagctaatttttaaatttttttgtagagatgatggtcccactatgttgcccaggctggtttcgaactcctgagttaaagtgaccctcctaccttggcctcccaaagtgttgggattacaggcatgagctaccacccctggcctgaatatcagtatttagcataaggtagacttttgaacattttataatctagcagtgattatcttgtagtgttttagtaatcatgctgtttactatttctgctgttaggggataggagtcatctatttctgatgacagtctcaaagcagagaagtgtacttgtgcatgtacacaacagctgacatggatgggaaggtggaagagtaaactaatgccttacctggtaccatttgaatttatggtaatgacatatttcaaatggttcttatgaatagaagatgattacaagccatctcttcttgacataccaggcaactgtttcgaccccacccacatccagctttcagaggtgcctcaggattctaagtcttttagagagcttcttattgatgcctcttttgcaggcagtagatatgagaaaacaaaatcctaatcactgttctatctatctcctatcttccaaaatattcttgatatctcctgtctgatgttatctttctctactcatgtggatttagatcttctttcctgttttcagtatttcagaagcagcaaatgctattttacattataatgactgggcaacttgatattgttttctagtcgttcccactcagttttctctgttacaatacatatgaaagaaactacgattgatggagaagagcttgttaaaatcggaaagttgaacttggtaagcatccaccttaatactactgtttcactcttaaacaccttatagagcagcttgaaattttgtccttgagacaaaatttttgtggtcactgggtgattagctttgtagtgggagaagaaatttgttaattacagaaaaaattattttgctggcgatttaatacattatgtatcctgtgagaatgaaagtctttgaatccaaatccaatagactcactttttatttttatttttaaaattaaaggttgatcttgcaggaagtgaaaacattggccgttctggagctgttgataagagagctcgggaagctggaaatataaatcaatccctgttgactttgggaagggtcattactgcccttgtagaaagaacacctcatgttccttatcgagaatctaaactaactagaatcctccaggattctcttggagggcgtacaagaacatctataattgcaacaatttctcctgcatctctcaatcttgaggtaagccctttgaaaggaagctgcaagtgtagtagctgtaattcttatttggctattatatattttaaaagttcatttactaggatggacacagtgactcacacctgtaaacccagcactttggaagtccaaggtgggcggatcacttgagcttaggagtgcctgggcaacatgccgaaaccctgtctctaccaaaaatacaaaaaattagctgggtttggtggtgtacaactgtggtcccagctacttggggggctgaggtgggaggatcacttaagcctgggaggcagaagttgcattaagctgagatcatgcaactacactccagcctgggtggcagagggagaccccatctcaaaaaaaaaaaagtatgtgtataaaaaaaaagaaaagtatgtgtatacacacacacacacacacacacacacacacacacacacacacacatatagtagggaaaaaaagttcatttagtagcttcatttttttttttttgagacaaatcccactcttgtcccccagactggagtgcgatgacgcgatctcggctcactgcaacctccacctcccaggttcaagcgattctcctgcctcagcctcccaagtagctgggattacaggcacctgccaccacgcccacctaatttttgtatttttagtagagacgtggtttcaccttgttggccaggctggtctcaaacccctgacctcaggtgagccgcccgcctttgtctcccaaagttctaggattacacgcgtgtgccactactcagcctagcttcgttcattctatgctataatgtaaaagaatctggacattgcatatgaatatatacaggaggacactcctgaagaagttatctttttccttcctggcagagtttttaaccttaaaaagccagtttcttaatggctttttccacacagtcttcaaagaaaattgctgtggtcattagcagtgggtggtgtatggagatttaattgaggacttagaagcaggccaagtgaatgctcgctagtgtggtagaggctgcttagagaacactgaagatggcgttggatgtgtgagaacagagaggaaaaccaagaaaagtaacaaagatggtaaaatgtacgcttattttattgctatcatctgccttaagtggaaattttatttatttattaatttttttacttttagaggtagagtctcatactgttgccaaggccgcagtacagtagcatgatcatggctcactgcaacttaaattcctggactcaagtgattcccccaaccacagcctcctcctgagtagctagtactacaagtgtgagccaccaggcctggctaagttttgttttgttttgttttaaatagagacagaggtctcactatgttgcccaggctggtcttgaactcctgggctcaagggatcctcctacctcagcctcccaaaatgctgcgattataggcatgagccacctcacttgacctaaatggattttaaaaagcttttttaggccaggcacggtggcttacgcctgtaatcccagcactttgggaggctgaggtgagtggatcatctgagctcaggagttcaagaccagcctgggctacatggtgagaccctctgtctctnnnnnnnnnnnnnnnnnnnnnnnnnnnnnnnnnnnnnnnnnnnnnnnnnnnnnnnnnnnnnnnnnnnnnnnnnnnnnnnnnnnnnnnnnnnnnnnnnnnngcatggaaagtttttccatttgttagtgtcaactctgatttctttcagcagtgttttataattcttaccgtagagatccttcacctctctggttagttgtattcctaggtattttactgtttttgtggctattgtgaatggaattgcattcttgtttggcactcagcttggacattattggtatataggaatgctactgattttagtacaatgattgtgtatccagaaactctgcttaaattgttgatcagatctaggagcttatggacagagactatggggttttctaagtataaaatcatatacacccagcggggctcggtagatcacacctgtaatcccagcagtttggaagatgtaggtgggcaggtcccttnagagcctgagcaacatggtgaaaccccatctctactaaaaaatacaaaaaattagctgggcatggtggtgcgcgcctgtaatcccaactactcaggaggctgaggcgggagagttgcttgaacccaggaggtggagattgtagtgagccgagattgcgccattgcactcaagcctgggtgacagagtgagactctgtctcaaaaaaacaaaaaagcttttttaaggtgtccaactgccccttcattaaaaaaaaatctttgttgagatttaattcacataccataaaattcactgatttaaagtatattaatttaataattctagtatatttacagagttgtccaaccatcaccaaaatctaagttttgaacattttcataacctcagaaagaaagcctgtacccattgaaattacttttccatttgccccactcccatcgctactgctttttgcatctatatatttgcctattctgggtatttcatataaatggaattacgtaataggtagttttttgtgactggcttctttcacttagcataatgttttcaaggttcatctgtgttgtaccagcaatactttattcctttttacaggtgaatattattctatagtatggatatgggatttttttgtttttttttttttttgagatggagtctcgctctgttgcctaggctggagtgcaatggtgtggttttgactcactgcagtcttcgccacccgggttcaagtgattctcctgcctcagcctcctgagtagctgggattacaggcgccaccaccatgcctggctaatttttgtatttgtggtggagacagggtttcaccatgttggccaggctggtctcgaactcttgacctcatgattcacccgccccggccttccaaagtgctgggattacaggtgtgagccactgtgcccggctgatataggacattttgtttattcatcagttggtagattgattgagctttgtggtttttttgttttgttttgtttttttgttttttttttttgagacaaggtccctctctgttggctggagtgcagtggcacattcactgtaacctcaacctcctggccttaagtgatcctcccaccttagactcccaagtaggtgggactataggcacatactactatgcccagctaatatttatttatttattgtagaaacaggatctccctatgttgccaaggctggtctcgaattcctgggctcaagtgaccctcatgccttggcctccaaagtgctggaattacaaatgtgagccatcattgagtttaagaatagtctaaaggaaattatcctaagggtcgagactctgaaaattgaagagaagggaaaaaaggattgaacaacttcctttttaaaggttgggcatagtggtcttaatgactagattttaaaattagatataactataaaatattacttgtaagttattatataacatattttagataacagaactacattattctcacaatatcttcagtaattgacctttcctttccatgacaggaaactctgagtacattggaatatgctcatagagcaaagaacatattgaataagcctgaagtgaatcagaaactcaccaaaaaagctcttattaaggtaactgtgaatttttgtagagtaatgtaatcttgtttgacaaatgtgaaaataagaaactgaagtgggagataatagttaaacaagatttgttaaattgcccatggaaggctttttatatagtgatttaaactaaatgtcttacatgttaacatatttttttctaatgctagtatgttgactttaccaactttatcaactgagttggtactcttagcaaaattttcatttatttacatttacaaaatttatttatttgcatttttgaggtataatttacatgccataacatccacctaatgtaagcatacaattcaatgatttatagtgcatttacagagttgtggagtataaccacgatctagttttagaaaatttgttatcactatccagtttccctttgctcctttacaatcatgtggccactgacctgctttctgtctacagatttgccttttctggacgtttcctataaatggaatcatgtaatatttggtcttttgcatctagtttcttttgcctagcataaccatttggggttccacttataacatgtatcagtagtttatttctttttattgctgaatagtattcaattatatgctgataatatgacatttggatcatttccactaatgccattgtgaacatttctgtacatgtctttgtgttgatgtgttttcatttcttttgggtagatatctagggatttaatttctgggttgtatagtaagtttatgctctaagaaactatnccatgtagctgtaccactttgtatttcctacagcagtttatgaggtctgcaatttctccacctcctctttaacacttgttatggtcggtctttttaattttaaccattctaaggagtataaaatggtacttcagtacggtttttttgtttttgtttttgtttttttttttgagatgaagtctcgctctttcacccaggctggagtgcagcggcacgatcttgactcagtgcaacctccgcctcccaggatcaagtgattcttcgacctcagtctcccgagtagctgggactacaggtgtgcaccaccacgtctagctaatttttgtacttttagtagagatggggtttcaccatgttggccaggctggtcttgaactcctgacctcgtaatctgcccgcctcagcctcccaaaatgctgggatcacaggcgtgagccaatacgcctggccccaatatggttttaattagcatttccctaatgactaatgatgttgaacatcttttcttgtgcttattatctatttgtttatcttttttggtgaaatgtctattcaaatgctttgcccaattttaattggtttgtcttattaagttgtaaggagttcatgtagtctagatacaagcccttaatgagatatgatttgcaaatatttcctcccagtctggctttactttttcctttccttgatgttttttttttttttaaataaagtttttagtattgagatgattatagattcacatgcagttataagaaataatacagagaaaacaggccaggcacggtggctcatgcctgtaatcccagcactttgggaggcccaggtaggcgaattgctttagatcaggagttcgagaccagcctggctaacatagtgaaaccctcatctctactaaaaatacaaaaattagctgagcgtagtggcacgtgcctgtaatcccagttactcaggaggctgagacaggagaattgcttgaactcgggagacaggttgcagtgagctgagatcgagccactgtactacagcctgggagacagagtgaggctctgtctcaaaaaaaaaaaaaagaaaaaaagtaataatacagagaaatcctttgtacattttgttgaactatagaatattaccacggggatattgatattaataacaatccactaatctttcccaattttccttacatgtgtatgtgtatttaattctagacagttttgtcacatgtataggttcatgtatttaccaccacaatcaagatactgaacagttccatcaccacgaggacccttcatattgctcttttgtaaccacttttcttcccaccatatccttcctttcctggtacccagtaacctgtcctctatcatttcaagactgttattgattggaatcatacattatgtaaacgtttgagattgccttatttatttatttatttatttattttgagatggagtctcactctgttgcccaggctggagtgcagtggtgcgatctcagctcacagcaacctccgcctcccgggttcaagcgattctccttcctcactctcccaagtagctgggattacaggtgtttgccaccatgtccagataattttttgtatttttagtagagacggggtttcaccatgttcgccaggctgggtctcaaactcttgaccttgtgatccacccaccttggcctcccaaagtgctgggattacaggcttgagccactgcacccagcagatctttcttttttagtactaagtagtagtccatggtgagtatgtaccatacatacagtttttgtaaccattcacttattgaataacatatgagctaatttcagtttttctgctattacaaacaaaactgctattgacattcatttataggtatttatgtaaacataaatttttatttctctgggataattgcccaagagtgcaattgctgggttgtataataattgaatgtttattattttagggaactgcctgtttttcaaattggctgtatcattttacagtgtatgagtgatctgatttcttcacatcctcaccagcatttggtggtgtaacttttttattttagtcattctgataggtgtggtaggtgatagatatctcattgtggtttttaacttgaatttttctaaaggctaatgatgttgagtgtctttttaatgtgcttatttgatgtttatatatttatgtatatatagcatatacatatattgcatatttatatataacatatacatgtatatatatatttatttcccattataatttatttggggaaatatctgtatatttgtcctgtagagttttaccatagtatcttttgacgtgttcctctgttctttgtattttctttgtaaatcggtagctgaatcttgaggcttgattaaattcaagttttgtcttatttatttttggcaaaactaattcataagcagtagtgtcttcttccatttagaagtatgtaatgtctggttctttgtcttttttttttttttttttttgagacggagtctcgctctgttgcccaggctagagtgcagtggtgccatctcggctcactgcaagcttcacctcctgggttcacaccattctcctgccttagcctcctgagtagctgggactacaggcgcctgtcaccacgcccggctaattttttgtatttttagtagagacagggtttcaccatgttagccaggatagtcttgatctcctgaccttgtgatccgcccgcctcggcctcccaaagtgctgggattacaggcgtgagccaccgcgtccggccagaggtatagttcttataggaaaggcaggacacatgcttgattaatttcctttatttgccaattttgagaataatgagttggtttcctaggtttcttagtgtcattataaactcctagatttaaactatttgtgttaacccattgtagttgttctcctcaccgatgctcagattggctcatcttaggccaggggtatgttagtctgttttcatgctgctgataaagacatacccgagactgggcaatttacaaaagaaagaggtttattggacttatagttccacatgtctggggaggcctcataatcatggcggaaggcaaggacgagcaagtcacatcttacgtgggtggcagcaggcaaagagagagagcttgtgtggagaaactcctgtttgtaaaaccatcagatctcgtgagacccattccctgtaatgagaacagcatggaaaagatccgcccctacgattcagtcatctcccaccaggtccctcccgcaacgcgtgggaattatgggagctacaagatgagatttaggtggggacacagagccaaaccatattaaggggttacatcttcaagtggcttactgagtccttttgattaacctagtaggctttgcttagcttatttccttgtcttatttgacaagatgttccgtattcatcttgaatattttctgcctcagtcctggaatcagatgcttttataaggaatcctggttcattttagtgtgaattactcctaccaacctgggtactggaggttgtggtttttcttgggaagtccatatttctagaatgagtgtatttaaaaaggagctttgaaagactttatttctaaacaaattaatattgattaaaaagtatggttataactttttatcatacttctttaagttttaaaagacataaaaaggctaactttacattttatttgttgcatgtccttcccaaactgaatgaaaaaagtactaaactgacacctacaacattcctcttgtgtaggagtatacggaggagatagaacgtttaaaacgagatcttgctgcagcccgtgagaaaaatggagtgtatatttctgaagaaaattttaggtaagcccttggctatggagttaatttccaagaataagcatttctgataacaggctatttgaagtaaaacttatgtagcagtaagtaaaatctttatatccagtgccgataaatacttcattttgtgtgtgtgtgtgttttcttttgagacaaggtctcgcactgtcacccagactggagcacagtggcacaatcttggctcactacgtcctcagtctcctgggctcaagcgatcctcctgcctcagcctcccaagtagctgggattataggcatgagccaccacaccctgctaatttttgcatttttttgtagagacagggtttcaccatgctgcctaggcttctattttgttttgacattaacaagtagctatcaaacactttttaaaaatcttttactaacttttaatttttaaatcattaattcatgtgaagtttcaagaagagtacaagagaggtttcatgtattcttcacccagtcttcctcagtggttatctcttaaataattatagtacaaggctggatgtggtggctcacacctgtgaatcccagcactttgggaggccaaggcaggcagatcacgtgaggttgggagtttgagattagtctgaccaacatggagaaaccccatcactactaaaaacacaaaattaccctgtgtggtggtacatgcccgtaatcatagctactccagaggctgaggcaggagaattgcttgaagctgggaggcggaggttgtggtgagccaagatcgcgccattgcactccagcctgggcaacaagagtgaaactctgtctcaaaaataagtaaataaaataatagataaataaaaaataggcgcgataaataaaaaataggctgggcgccgtggctcacgcctgtaatcccagcactttgggaggctgaggcaggcagatcacctgaggtcaggagttcgagaccagcctggccaacatggtgaaaccccgtctctactaaaaatactaaaattagccaggcatggtggcaggtgcttgtaatcccagctactcgggaggctgaggcaggagaatcacttgaacctgggaggcagaggttgcagtgagctgagatagcagcattgcactccagcctggggaacaagagcgagacttcatctcaaaaaagaaaaaggaaaaaataataataaaataaataaaaaataattatagtacaatatcaaagctgggaagttgaccttgatacaatatgtgtattagtttgttcttatactactatagagaaccacctgagactgggtaatttataaagaaaagaggtttaattggctcacagttccataggctgtacaggaggcatggctggggaggcttcaggaaacttacaatcctggtagaagagctaaggagaagcaagcacatattcacatggcggcaggagagagaaagtgaagaggaaagcactgcacacttttaaacaaccagatcttgtgagaactcattcactatcatgagaacagcaagggggaagtccatctttatcactcggttatctcccatcaggtccctcctccaacatgtggggattataattcaacatgagatttcagtggggacagagaaccagaccatatcaagatgtgtatatagtagttctatgccattttgtcacttgtatagatttgtgtaaccaccactgcaatcaagatacagaactatcctatcatcacaaggatctttcttgctaattcactgtagtcacactcacctcatcttttccatgattcctaacccctggcaaccactaatctgttcactttttaaagccctggagtaatttgttcaaaggaaagcttttattgaggcccattgtataaaacaacaataataacagagaaaacaaggggaagaaggcaagtgggatgctaaggactataacttgaaaattcctgattgtgtttatccttgaagatattaggaagcaagactttcacagagcattttttaaaagttaatagtgataaaagatattagacctaataataaccagaagcattttagtataatcttttactgaacttttttgtagatgttaacactctaatagtatataaatcatttaataaacttagttttttctgtgttacttccaactgtcataatgtattccatgaatgtgtaagatgccctagaatcagaacaatgtaagattgtgggttagtgaacagtttaccatcactaatggaggtgttctttttttgatgctttagaagtaaaaaataattggtgaggcactcaatcctggcctgtagtctttagaaatgatattgattattggaggctttcatctttctgattttatttttgaacttaagaagtaactttggttttcatttgtttagtcccatgattgaaaatatggtgtttgctctctttttttttaacttttattttagtttcaggagtacatgtgcagatttgttctatagatatattgcatgtaacaggagttggtgtacatattattttgtcacccagataataaccatagaacccgatggatagcttttcaatccttgctctcctcttaccctccaccctcaaagaggcccaggtgactattgttcccttcctcatgtccatgtctgctcagggtttagctcctacttataagtgagaacgtttggtgtttggttttctgttcctatgttagtttgtttaggacaatggcatccagctccatccatgttgctgcaaagaacatgatctcattctttttttttttttttttttttcgagacagtcttgctctgtcacccaggctggagtatagtggtgtgatctcggctcactgcaacctctgcctcccaggttcaagtgattctcctaccccagctgcccgagtagctgggattacaagcacctgccaccatgcccagcaaatttttttttttttaagtagagatggggtttcaccatgcaccatgttggccaggctggtcttgaattcctggcctcaagtgatcaactcaccttggtatcctggcgtactgggattacaggcatgtgccactgcacccagccatcttgctcttttttatgcctgtgtagtattccatggtgtatatgtaccacattttctttatccagtctgctgtggatggatagctaggttgattccacgtctttgctgctgtgaatagtgctatgatgaacatatgtgtgcatgtgtctttatggtagaacaatttatattcctttgggtatatacccagtaatgggattgctggctcaaatagtatttctgtgtgtgtgtggtttttttttttttttgagatggagtcttgctctgttgtccagggtggactgcagtggcacaatctcggctcactgcaaactctgccccccaggttcaagcaagtctcctacctccgcctcccaagtatctgggattataggcacccaccaccgcacctggctaatttttgtatttttagtagagatggggtttcaccatgttggccaggctggtctcgaactcctgacctcaagtgatctgcccacctcggcctcccaaagtgctggattacaggtgtgagccaccatgccctgccggtatttctgttttaagttctttgagaagtcgccaaactactttccataatggctgaactaattttcattagtagcatataagcgttcccttttctccacaactttatcaccatgtgttattttttgactttttaataatagccattctgactggtgagatggtttctcattgtggttttgatttgcatttctctaacaattaatggtgttaaacatagtttcatatgcttcttagccacatatatgtcttcttttgaaaaatgtccacatcatttgcccacttttttttttttttttgagacacagtttcactgttgcccaggctggagtgcagtgtggcacgatctcagctcacttcaacctccacctcctgggttcaagcgattctcctgcctcagcctccgaagtagctgggattacaggtgcctgccaccatgcccggctaatttttgtatttttagtagagatgggatttcaccatgttggccaggctggtcttgaattcctgacctcaagtgatctgcccacctccgcctcccaaactgctgggattacaggtgttagctaccgtgccccgctgggtgtatatgattttatacttagaaaaccccatagtctctgtccataagctcctagatctgatcaacaatttaagcagagtttctggatacacaatcattgtactaaaatcagtagcattcctatataccaataatgtccaagctgagtgccaaacaagaatgcaattccattcacaatagccacaaaaacagtaaaatacctaggaatacaactaaccagagaggtgaaggatctctacggtaagaattataaaacactgctgaaagaaatcagagttgacactaacaaatggaaaaactttccatgctcatggataagaagaatcaatattgttaaaatggccataccacccaaagctatttacagattaaatgctgttcctctcaaactaccaatgacattcttcacagaaaaaactattgtaaaattcatgtggaactggaaaagagcccaaatagccaaagcagtcctaagcaaaaagaacaaagctggaggcatcgcattacctgacttcaaactatactacagggctacagtaaccaaaacatcatggtactggtacaaaaacagacacagaccaatggaaccgaatagagagcccagaaataaagccacacacctacagccatttgatcttcgacagaacatgcaatggggataaaactgcctgttcaataaatggtgctgggataactgcctatccatgtgcagaatattgaaactggaccccttccttaacgcccatatacagaaatcaactcaagatggattaaaaacttaaatgtaaaacctaaaactaaaaacccttgtaaaaaacctaggtgtttgttctctaatacacatgaggcataatctgagatagttttgtctgaaaacgcttttggaattagtacagtgtcagtcagagaagaatcacaaaaactacagccaacatttaaaacaggataatgctttatttaagccaagcttaatagacattttaaaaccatatcaaaatcatctcatccatacagtaacaatgttgtattaccccttggcattcactataaaaaagcatttcaaataatcccgttttacataaaagatctatttctatttattttattttatttttatttttatttttgagacagagtctcactctgtcacccaggctggagtgcagtggcgccatcttggctcactgcaagctccgcctcctgggttcacgccattctctcgcctcagcctcctgagtagctgggactacaggtgcccgccaccacgccctgctaattttgtttttgtattttagtagagacagggtttcaccatgttagccaggatggtcttgatctgctgacttcgtgatcttcccgcctcggcctcccaaagtgctaggattacaggcgtgagccaccgcgcctggctgtagaagatccatttttaataaaaagctaatatatttcatcaaaagactattagaattaactcttctcttacagctcttttctagcttttcctttagtcaacaatatctctagctaatacgttaagggaatttgtattcacggaagaatctttgtcatttaagcataatgtgaaatagaaaattgttggttgttatcaaagaattagatgagcaaatacaggcattcatttctgaaactgactaatactcaagaaatcagagacccattaaagtgggtttggaagacctgtgagctttgcgcttgagaaaagcattctctattttactttttatgacttcttttgactttgacttcatcttctgatatttttgttgaatttagaaatttttagtttctaaaaactcttttctgccatccctgtctctccttttgaaaaatatagcatccttttattttatagatctattccttatctcagaaacattattaatgttattaaagttttcttttatgtttttctttcctttgggatcttttttttccctgttgtgatatctgtcatttgtatttattttcttcaaatgtctagtgatttttggctggcaattaagatggattagaagctttgtacatgggtgaggattatggacctgtaagttcactatagatgaaaaagtggtgatctcagtcttaagtctgggcttccatcagatatcattctttgttggattttttttcttttgttctagccctcagtcttttctgagaagatttgcccagtttgcttggagatttttctagctgctgctattttttgattagagtgggtatagggggctgaggattccatcattttgtatgtagatttacacttaaatgctcatttctagtccctaaaccttctacagtccatgatgtctagtgaaagtgaacctggaaattctgctgcaattcctatagactagtggctgtcaatggaagtggtgttgggggactggtggtggtgggtggttttgtcccccagaggacatttggcagagtccagtgacattttttatcatcatgacttggatggtactgaacatcctaaaatgtacaggacatccccacaatgaagaattatttgatccactagtgctgaggctgagaaactctgctctagagagtaatcctttgttctcatgagggttatgcggtggggtgagagtggtgtttgtgcgtgttgcagcagcagggggtgtaattgctctgtatacatactttaagtctcagtttttaacccctaatcttaccccttccttctaagatacctgatgccttcaagtcccacatttttccagcattctgtggggcatatttatattctgtatccctgattatagacacttaggttgcattccctcctctctctactttgagttatagtccgtcctctgttagctttctagcttctcaaatctggaacacacatgcttttcccctcataggtagggattcttagtttcagaattgagggcaagggaaaaatatttcatttataaaacaaagacaaggaatataatttgttctttgtaatttgtatttattgcttattgacacaggtatcaagtgacacttgggtatcaagtgatggtgataaatgttggaaatgagtttgtgtagctgtcacaattgtgttagaatacattttataggagttagaaaaaaatattaactgttaaactcatattaaactttattttagagtcatgagtggaaaattaactgttcaagaagagcagattgtagaattgattgaaaaaattggtgctgttgaggaggagctgaatagggtaagcacttaaaatgatatttactgttatgtgaaaagcaaatattgaaagaaaattttagaatgaaagatctaatattttttccttcaagattttttttttttagacggagtctcgctctgtcacccaggctggagtgcaatagcgtgatctcggctcactgtaacctctgcctcccagggtcaagcgattctcctgcctcagcctcccgagtagctgggattacaggtgtgcaccaccatgcctggctaattttttttgtatttttagtagagacagggtttcaccatgctggccaggctggtcttgaactcctgacctcatgatctgcccatctcagcctcccaaaatgctgggatgacaggcgtgagccactgcacccagctccttcagatttttttggaaaaaaaaaaaagattttattttgctgacccttatactgaaagtaagttatatcatgattttttactatcattaatcacatcaaaaaagctgacagcttatattaataaaacattacaagaaattaactgaattgtttgattttgttattgaaactacaaaatagtgaatgctgaagcagttttgttaacatgtttatcagatgaaggaatacagatattgggagagactggatgttaaataaaagtaatataactagggtaggcaagaggcctgacctttcagggccaccctcatattaatacctttatttatttatttttaattattttttagagacagggtcttgcttgatgcccaggctacagtgcagtggtgtaatcatatcttactgcagcctcaaacttctggtctcaagcaactctcctgcctcagcctcctgagtagctggacttcaggcatgcactaccatgcccggctaattattttatttttttgtagagatggagtcagtctcgctatgttgcccaggctggtctcaaactatggggctcaagtgatctcctgccttggcctcccagagtgctggggttacaggtgtgaaccaccttgccaggccacattaacactgttatattcaaatccattgacaatgttgaaggaaactgaagaattaatagtactacaccagacctattatttaatctcaaagtgttgagtaagattacagaaagaaacaggatgacatatttgtgttaacctaccgggtaacttcttacaacttttgcatggaaataatttgtttcatttttctaatcttatgaactagctagatatcctaccagccagctcagcgttttttaaattcttatatttaggttacagagttgtttatggataataaaaatgaacttgaccagtgtaaatctgacctgcaaaataaaacacaagaacttgaaaccactcaaaaacatttgcaagaaactaaattacaacttgttaaagaagaatatatcacatcagctttggaaagtactgaggagaaacttcatgatgctgccagcaaggtttgtcccttgtgttgatttgtactcatattaagtagagaatgggtagaaaaaattttctgtgcttaagcattaaatattctgtttattcaccccaaatggtatttctgtccatttaaaaaacattattttactatttcatccatgtttttctcactggagatgtcgacttatgaaaaaactactcctgctcctggagttttgaaaatagaacataacttagctgggagtggtggctcacgcctataatcccagcattttgggaggccaaggtgggtggatgacctgaggtcaggtgttcgagaccagcctgaccaacatggagaaacctgtctctactaaaaatacaaaattagccgggcgtggtggcgcatgcctgtaatcccagctactcgggaaggctgaggtggaagaatcacttgaacccgggaggcagaggttgcggtgagccgaaatcacaccattgcactccagcctgggcaacaagagcgaaactccgtctcaaaaaaaaaaaaaaaaaagaaaatagaacataactttataatatattttgtagacatttagaatagtgatgctgtgatgctttttctttgtggggatgattgaacctaattagtcattaagaatttagtatgttctgtccaggcatggtggctcacgcctgtaatcccagcactttgggaggcccgaggtgggtggattgcttgaggttaggagttctagaccagcctgaccaacatggtaaaaccccatctctactaaaaaaaaaaaaatacaaaaattagccaggcgtggtggcacatgcctataatcccatctactcaggaggctgaggcaagagaatcacttgaacccaggaggcagaggttgcagtgaaccgagatcatgccactgcactccagcctgggtaacagagcaagactctgtttcagaaannnnnnnnnnnnnnnnnnnnnnnnnnnnnnnnnnnnnnnnnnnnnnnnnnnnnnnnnnnnnnnnnnnnnnnnnnnnnnnnnnnnnnnnnnnnnnnnnnnntttcggaaaaaaaaaaaaaaagaatttagtatgttctgatgatgaaagatgttgaaagtatttaattttttttttttttttttgagacggagtctcgctctgtcgcccaggccggactgcggactgcagtggcgcaatctcggctcactgcaagctccgcttcccgggttcacgccattctcctgcctcagcctcccgagtagctgggactacaggcgcccgccaccgcgcccggctaattttttgtatttttagtagagacggggtttcaccttgttagccaggatggtctcgatctcctgacctcatgatccacccacctcggcctcccaaagtgctgggattacaggcgtgagccaccgcgcccggcctttaattttttattagttgtactttttttttttgagacagactcttgctttgtagcccaggctggagtgcagtggcatcatctcagttcactgtaacctttgcctcccgggttcaagcgattctcccgcctcagcctcccaagtagctgggattacaagcgcctgccaccacacccagctaattttgtatttttagtagagactgggtttcaccatgttggccaggctggtctcaaactcctgacctcaggtgatccacctgcctaggcctcccagagcgttgggattacaggtgtaagccaccacgtccggccattaggtgtacttctgaggaaatagtagaacatagaaggaaaaaaatttctgaggaagcataattattgcaataactgaaaaaatcagttttccttgcttgtgtagatggctacaggaagggaaataaacattactgggcatctggataaattagcatgagttaaagcatttcttctgatacaatgtctaaaattgactttttttttttgagacagagtctctctctgtcaccccggctggagtggcagtggcacaatctctggctcactgcaacctccacctcccaggttcaagcaattctcctgcctcagcctcttgagtagctggaactacaagtatgtaccaccacacccagctaatttttgtatttttagtagagacggggtttcaccatgttggccaggctggaaaatttactagttcttatcaagataaatccttgtgtagatactttcatcagattcctttcaccgtatccattttgtctaacacttatttttaaaaatatagctgcttaacacagttgaagaaactacaaaagatgtatctggtctccattccaaactggatcgtaagaaggcagttgaccaacacaatgcagaagctcaggatatttttggcaaaaacctgaatagtctgtttaataatatggaagaattaattaaggatggcagctcaaagcaaaaggccatgctagaagtacataagaccttatttggtaagttcaggctgttctgttctagtcttgatgtgttaagtgtaatgttgatttcaaaactgataattttgtgaaacatagatgacggtgtcaccaatactctctaccatgcacaaactatttgttcagggtgaagattaatgcttttattgtctttgaattaaaacaaatcttttttccctccccaccctcccttctgttttctataaaatgttacatttattaagtaactaagtatataaacgttagaagtagaagtcctctttttccctgactccggctcctgaccctgggtcattgaccataggtgttattgttaaatttcttgggcctttttctggaaattttttgtgcataaacattctgcaactttttttggggggggcatatatatcttgatggtttgctatattgtcagaatatgtttgtgtctcattgtttttaactattatctccctttagaaaaaagtatgtttatttagtgtgaaatactatcctcattatggaaaatttggacattcagaaatataaaaatttaaaaaatcatctagactctagtctcactaagccaagcactatactttttggtattgatttccagttttttttttcttctgtaaacttaccataattctgtatattatttttagttagagattaattgtagaatattctaattctttgtgtactatgaattatagttatgggtctgatacacttacaaatatgttaagggcttacagagcactatagaaaattgtaatgtatatttaaatatttccttgctttgtagtgagccagttcttttaagctcgttattacaaattctacaacaagggtatacttttgtcaacttctttgaaatggtttgaacggtatttaatatatttatgtcaaagtttacatctttctgtttttgtttgttataggtaatctgctgtcttccagtgtctctgcattagataccattactacagtagcacttggatctctcacatctattccagaaaatgtgtctactcatgtttctcagatttttaatatgatactaaaagaacaatcattagcagcagaaagtaaaactgtactacaggaattgattgttagtacatcctttaaaatatttttgaagggttgcatttgataagtatttgataaaatattttgaagggttacatttgataagtctttataaacaatgttaactgctattctttcttcctgagctttactagacacagtcatagacacgtcactgtgagagactacatatatatatattttgttttgttttgttttgtttgtttgttttgagatggagtctcgctctgtcgtccaggagtgcagtggcgtgatctcggctcactgcaagctctacctcccgggttcatgccattctcctgccttagcctcccgagtagctgggactacaggcgcccaccaccacacccggctaattttttgtatttttagtagagatggggtttcaccgtgttagccaggatggtcttgatctcctgaccttgtgatccacccgcctcggcctcccaaagtgctgggattacaggcatgagccaccgtgcccagccagcctctccttttctttatttgtatttatttatttttttcagcctctccttttctcggctcactgcaacctctgcctcctgggttcaagcagttctcttgcctcagcctcccgggtagatggaattataggcatgtgccaccacgcctggctaattttcgtatttttttttagtagagatggtgttttaccatgttggtcaggctggtctcaagctcctaacctcaagcaatccacccacctcggcctcccaaagcgctgggattacaggcgtgagccaccgtgcccggccgagagtacgtttatatttttaaagacagatctctccactgtttattctctcccagaaagattattttcaaatgtatggaactaacttttgaaacctttttcactcatgtcttgtaacattaggagtagcagttattagtgaggcttctaatgactaaagggcaagtttagcaccacatgatatcaagggacttgttagttggcccagaaattggcaagtcactctttccccaggggtcctggacccaaccagaaggggatattgggtagctgattttaaaactacagtaatatatgatagtaataatggtgcaagaaaaatatcttagaattctggggacacatatcacttcttagggttagatctgtgtggccccttctgggccataactataaatcttttctccagagttctatggaagtcactcatctaattgcacttaatattacctccttcatacttgatttatatatagtctttattttataattgtatggttggtctaggaagttcttagccatataatttatttgttttctttgtgcagagtctttgcctccctttttcagcttaacaatatttattaaacattttccaagtaaatactacaaatgttagctgaccctctgcctcaattcagtgcttagatgacattatttgataggttttctcaatcacccaaatttgacaaaattaaaagatatcctgtcagtactaacttttcaaatattgattcattcattaaatggtggtctgtatatatataggcatacttcagagatattgcaggtttgcttccagaccactgcaataaagtgaatattacaataaagcaagtcatgaattttttgctttcccggtgcatataaaggttatgttgaccaggcgcagtggctcacacctgtaattccagcacacgcctggtgggacaatcagaacacaacgtttatcagttacatttgctgtcttataggggtacagtttatggtaccccaagacaattacaatagtaacatcaaagatcattgatcacagtgtataatgaaaaagttagaaatactgtagtagttaccaacatgtgatgcagagacagaaagtgagcacatgatatttgaaaaaagtcactgatagacgtgctcaaggtagggttgccacaaaccttcaatttgtaaaaatttggtatctgtgacacatagtaaggtgaagcacaataaaataagctatgcctgaattgatacatttctacttaccaagttacaatttttgcttgaattaaaagaaaagaggcatgttgctctcacaaaattagttgaaattggtatgctagctcttctttccaaaagaatgtcagtagacctataagtatttactaatgtatttctgttatacttcctcagccctatcctaccaaaaggagattagatcaggattttttttctttttataaatatttccaatctatactacattcttaatttccctatttcttgacaagaacaacatctttcacaagttcttctgatacaataggatgtaagtcatctcagatcttcaaagttaagtacttccagcccaagggctaatcttgatgactacttggtctcagcctttttgactggtaacctaaacttgtttgaaatttattttcttaaaatatacctgtaggtttttaaaaatttattttgtttggagtgctgaaatcttattaactgtcattttcctcttttgaattcttctgacttctatttcattaaactattaaatagttctggctgggtgcggtggctcatctcagcactttgggaggccaaggtgggtggatcacttgaggtcaggagttcgagaccagcctggccaacatggtgaaaccctgtctttactgaaatacaaacattagctaggcgtggtagcaggtgcctgtaatcccagctacttgggaggctgaggcaggtgaatcgcttgaacccaggaggcggaggttgcagtgagccaagatcacgccattgcactccagcctgggccacgagagtgaaactatatctcaaaaaaagaaaaaaagaaattctgtgttttcactgggcttgaaaaaagagaaattattatatttattgtaatataataaattattgtattattgtattgatttatctatgtagagtataaaaaatggagaatggggccgggcgcggtggctcacgcctgtaatctcagcactttgggaggccacggggggcggatcacctgaggtcaggagttccagaccagcctggccaacatggcgaaaccccatctctactaaaaatacaaaaattagctgggtgtggtggctcacacctataatcccagctactccggaggctgaggcaggagaatcacttgaacccaggaggcagaggttgcagtgagccaagatgttgccactgtactccaacctgggtgacagaatgagactccgtctcaaaaaaaaaaaaaaaaaaaaagaatggagaatggaaatgtaaattttaatgtgaatgtttagctaccaaagtatttaagatatcatttagaaaggtttacagaagtggaaatattctttttaaagacctatttgtttatttctgaaaccagaatgtactcaagactgatcttctaagttcactggaaatgattttatccccaactgtggtgtctatactgaaaatcaatagtcaactaaagcatattttcaagacttcattgacagtggccgataaggtaacaaatgctatgttcttaatatctcaaaattgatgtgttgtttaagaaggaaactcatttttgtttcttcaaagatagaagatcaaaaaaaggaactagatggctttctcagtatactgtgtaacaatctacatgaactacaagaaaataccatttgttccttggttgagtcacaaaagcaatgtggaaacctaactgaagacctgaagacaataaagcagacccattcccaggtatgttgtttagcggacttggggagtacagaaagagagttttaggatgatttgatatgacttgataattaatctatgttacacaatctgaatactgtaaaagctgaaacctgaaaataccatagccactgttgcttataacagtaattattgtagaacaattgagaatacttctcttaatatttgaagttttgctacatctagaaccccatgcagaaccacaatatgacaaaacagtccttttctcacatcaagatgaaagatgaatctggaaaaacatacctttagagaagaatggttataacatttaaagtgaaaatgtatctacattaaaacctgctaagttgtttctaggatggcatggatagttgtctttcataaaccaagtcctactttctcttatttctgtctcactgatagacatttaaaacatagtaaatcgatacaacttttaattcttattgattataaatgtaattcatgatttatcttccctgtaaactgttcctcattatatgaggctttaaaccaaaaccaagccttcaaaccataatctgtaaatatcagatatctgaaaaacagcttctggtattcttaagactttaataatgactgtctaaagttttattaaatgagcttattataatatgacagaactcttataatagttaacatttattgagcaattcactgtgtttattcctcccatcaatatagatataaattctattactagtcagatttttaatgaggaaactgagaccctgtgagcatctaatagtatgtagatcatcttgcagaaggtggtagtgatcatactacctgaaaagcatccatgtttgagtggctcttttgtgtgttttttggcaacttaaaactgcagcattttctcatacatctacatagggtatttcccttaaacccgttgagaactttttaggtgtatattctaaggctgatcccctttttataaatttgctgttttgaaatgcttaaaattgttagacagctctttaaaaaaacaatacaaaaaaatctgatctgaaaagtatcttagcatgaatggtttggctttcctggctttaaggaagcaagttcagtatgtgagctatttcttaggttttccagaacttgaaatgagcactactaaaataattatgtaaaactttgaacacatttacatatagataaatataatacctgcattagcattcaaattattaatctgataatacctttgagactagtaaaaatactgacagactttattcataatcagaatgttagatatgtattgtcaactgatgtgttattcagagatactggccaaccagcagactgaagagtgaataagaatgttggatgcattttcagctcttctttggtcattaggatggcttcttcattttgcaatgtagcatgttatatgcctataagagcttgttttcaaagatgtaaaatatgagcaaagataagactatttacattttgttaatatgatccaactaggttctgtaacattttttagctccagtaattgataatatttttggattgcttgacccgttagtatatcacattaattttcccttctagcagtgttatcagttaaaaagcaactatatatatctgtcaaagtgggtcttaaacataatgtgatatatgggttgtttgattagttttgaggtacactgaaagtaatttgttacttacagctaaaatagtaaagtttgctaattatttactttttaaaaaatcctggctggatgtgatggctcatgtctgtaatctcagcactttgagaggctgaggcagggtgatcacttgaggctaggagttcaagaccagcctggtcaacatagcgagatcacgtctctacaaaaaaaatttgtttaaattagccaggcatggtggctcatgcctgtgtagtcccaactacttggaggctgaggaaggaggatcccttgagcccaggaggttgaagctgcagtgagccttgattgtgccactgcactacagcttggacaacagagtgagaccctgtctctaaaaaaaaaaacaaatcctacattttaatatcacttccactgctttcctctgtagaagaaaggtaaagttaactttatctcttgtcaagaatttatataattctcacctatggacaatacttcttgttttgttatcagtcataaaaaatgttcaagtgtcataattttaagtctcttcacttcccacacctttcttacaggaactttgcaagttaatgaatctttggacagagagattctgtgctttggaggaaaagtgtgaaaatatacagaaaccacttagtagtgtccaggaaaatatacagcagtaagctatttttaaattctcttaaacttttctgtaagtctgaaattatttaagaagaaaaagctttaaatagtacaaataattcctctgtgtactttcaaatttctcttttgttaatattttattatgtatgtgtgtatgtatatatatacatgcatataaatgtcttttcattgcgtatttgtgctctcttttaagacattgaaaaacctggctgttacccacaatatattttcgaatttcctcaatcttagaaaacacactaagtaatttcacaatttctaacctatattactgatgaaaaatatactaactagagcagggtttggcaaactgtggctagcaggctggatgcctgttattgcaaataatttcattggacactgtttacatgttgtctttggctgcctttgcactgcagtggcaaagttgagtcattgcatccaggtcattgaacaatagcctaaaatatttgctatctggcttttcaagaaaaagtttgctgattcctgtattagggttttgttttttgtttttgtttttgtttttgcgacggagtcttgctctgtcacccaggctggagtgcagtggagtgatctcagctcactgcaagctccgccttccaggctcacgccattctcctgcctcagcctcccgagtagctgggactacagatgcccgccaccatgcttggctaattttttgtatttttagtagagaggggtttcaccatgttagccaggatggtctcgatctcctgacctcgtgatccgcccgcctcggcctcccaaagtgctgggattgcaggcgtgagccaccacgcccggctctgttttgttttttcagacaaaaacaaacagcctgctctgtagcccaggctgaagtacagtggcgcgagtgcagtggtgtgatcttggctcactgcaacctctgcctcctgagttcaagtgattctcctgcctcagcctcccgagtagctgggattacaggcacataccaccatgcctggctaattttttgtatttttagtagagatggggtttcgccacgttggccaggctgatcttgaactcctggtctcaactgatcctcctacctcggcctcccaaagtgctgggattgcaggtgtgagtcactgctcccagcctgtattagagtttaatgttgctttgtagcctcattgcttgccagttccgcatacttaacatacactacagtcagacctatgttttcttttaggaattttataactttatggtttaacatttatattcatgatccatttaaaaatttttataaaacataggagatttgtcaagtttcagttttttgcctattgagtattctatactcatgaggagaaagatactatatttaccctatttttccccatttaattctgaaattaaacttcctaaagtttcaagctttctttggtgggaagtagtctttaagggtgggtctgctggacagaaattgtttttctttgtctaagaatgtcttgatttccccttcattcctgaaaggtattttcactggctgtggaattcagggttgacaattatttttttccagcatttgaaatatttccattttcttctggcctctatgaaatgagaaatccactgccattcaagtaattgttcccttataggcagtctccctatagctgctttcaaaacttttttgtctttagaaacttgattatattttgtctacttatatttcgttgagtttattctatttgggttttgtttagcttcttgaatctgtaggcttatgcctttcaccaaaacttgggaaattttcatctattaattctttgaatatttttcagccctatactctttttcatctgcccctatgactttgatgacacaaatgttagatcttttattttggtccctcaggagatatgtagaatatatttcttatagatacatatattctctttgttgttcacatgggggaaatactattgatctgtcttcatattcactgagtctcttctgtcatctctaacctactgttaaacccattcaatgaggtgttttttcagttattgcttttttatttttagttttataattttcatttgctttttttataccttgtttcttagctaggatttttttcttttccaggagtattttaatttctttttggagcattttttgatggctgctttaaaatccttgccagacaattccaacatctgagttttcttgttgttgccatctattgattgtcttttctcattcaacttgtgatttttgtggttcttgatatatgataagtgatttcctattgtaccttgaagattttgggtattatgttaggagattcaggatcctatttaagtattttttagctggcattcaccctgtttaggcttagcatacagatccaggctcacttttatgggctgtggttccactgacaatttagtttttagagcccttgcagtgttattctgataatgctttgtttgtgtgctacccacatgagaaaaatttgtattctgcttttgttgcatgaagtgttctgtatgtgtcactttgatcaagttgattgatagtgctattcaggtcatccacggccttactgagtttctgcctatttgttctatcagtgacttagagaggagtattgaaatctctaattgtagatttatctattttttttattagttctatcagtttttgcctcgtgtatctgaaactctgttgttgggtgcatatacatttaggattattatatctccttggagaattgacctctttatcattatgtaatatccacttttatttctgataagctcttgttctgaagtctgttttgtctgaaatgaatacaggttttctagctttcctttgattgctatttgtatgatgtatccttctccatctctttacttttggtctaagtctttatatttaaagtgggtttcttatagacagcatgtagttgggtcttgctttttcatcaaatttataatctatgatgttttatttttatttatttatttgagacagagtcttgctctgtggcccaggccggagtacagtggtgcaatcttggctcactgcaacctctgcctcccgggttcaagtgattctcctgcctcagcctcctgagtagctggggctacaggcacacaccaccatgcccagctaatttttaaatttttactagagatggggtttcaccatgttggccaggctggtttcgaactcctgacctcaagtgatttacctgccctggcctcccaaagtgctgggattataggtgtgaggcactgcacccagctgcctttcctcatttaaattgagcactttttatgtttttatctcttccattgacttatttatactttttaaatattccctttttagtagtatgtctaggatttaaagtatacattttaagataatttgaatttgtatacattttaagataatttgaatccattatcaaataatttgctgtttcatgtgtagtgaaaggacattataatagtatattcctgtttcctctttcccgtttgtcattattttcatatgttttacttaggtgtttatatgtgcaataaacacctaatacattgttacttgaattgctttatctattttcttttttaatgtatctactagatttttttttttttttttttgagagggagtcttggtctgtcacccaggctggagtgcagtggtgcaatcttggctcactgcaacctctgcctcccaggttcaagcaattctcctgcctcagcctcccaagtagctgggattacaggcacctaccaccatgcccggctaatttttgtatttttagtagagacgggggtttcaccatattggccaggctagtctcaaactcctgaccttgtgattgcccgcctcagaaatttttaattgcatatgtggcttctattatacttctgttgaacagtgctgttctggaactctagctatcatttatatatccctacctaacttctgtcatttgtttttcaaccctgtttttgatcctgttaagtatagcatgttccattgtgaactcttcctatatgctgaatcaaaaaagtatgtcctactttttattcctagtatctagactgatggatttctaggccattccatagccgtggaggaaatactagagtaggattgaagtaggaagggaagtatgatatactttcttaaggcccatgcaaatcatttttcctgctttcctgacatttattgtctacaccagagtttcccagtatggtctagggactttgtattcatcacccaggaatctaggtgatgtttatgtacacactgcacataactgcgtttggcatttattgtcatggcttatagtacttttaactcaatctcgtcttcccattaagttgtgagattttgttttgttttttttatttgagacagagtcttgctctgtcgcccaggctggagtacaatgacacaatctcagctcactgcaacctctgcctcctagggtcaaccaattctcctgcctcactctctcccaagtagctgagattacaggcacccaccaccacgcccggctaatttattgtatttttaatagagacagggcttcaccatattggccggactggtctctaactcctgacctcaggtgatccacctgcctcggcctcccaaagtgctgggattagaggtgtgagccactatgccttgcccttttttcagtcattgtgactttcacgtgtaggtttggtttttaacatctttgctgactcacttggtttacccacgtggtgtaccatctagtggtaatagagagtcacttcattccacaaggtttaaatcttgtaagataacttggaatgctattatagggcaacttaccgagatggaaattatcaatgaattttaaatgtatgtctaaccaacattaatattatatcaagtttatgttacattgttctatatgtataatttgtcacaccccaatataattttaattattagaaagctttatagctaatttaaacataacatttgtaatgttcatgatttgttttacatactaggcaagggaaactgcttaataacagaataaatgactgattgtccaatttagggactagacaagaggctgtagtagatgccctgaagtaacattgcctagtaagaggaataaaacaagtagacagattttgaaagcatctaactggaggagggttgtgaaaggtttggggtattcttctagcagtcgaacgagcgggtctannnnnnnnnnnnnnnnnnnnnnnnnnnnnnnnnnnnnnnnnnnnnnnnnnnnnnnnnnnnnnnnnnnnnnnnnnnnnnnnnnnnnnnnnnnnnnnnnnnnaccaagtagccagttttcaaagcatcaaactggaggagggtgtgaagggtttcatgaccaaagatgatccttccaaaggtcatttaatggcaatgctgtgaaaagacagtgcccaaggcatccattctcaatgcagaagatttactaagatcacgggccctggagccagactgtccacgttcagatctgccacttaagagctgagtgatcttgggaagttatatatcctttgagtcttaattccccatttcaacagtgtcattctcttttcctataggaaatctaaggatatagtcaacaaaatgacttttcacagtcaaaaattttgtgctgattctgatggcttctcacaggaactcagaaattttaaccaagaaggtacaaaattggttgaagaatctgtgaaacactctgataaactcaatggcaacctggaaaaaatatctcaagagactgaacagagatgtgaatctctgaacacaagaacagtttatttttctgaacagtgggtatcttccttaaatgaaagggaacaggaacttcacaacttattggaggtaataactttgtaagtggaacttactttggggagaataataatcagaaagttaaatattcttggctaagaatagatttcaaaacaaatgatattttaagctataatgacttaaacttttaagtataatatttggtatgcttacagatgatctcgttttgtgctttgttatatgtcttctcaatcttggaattaatttaacatttgtacagtttctttcctgtatttatccttggtttctgacttagtagtttcttcaaagaagggcaccctgtcttttgatatgtaataccttccacttatatatgctttttttttttttttttttgagatggagtctcactctgttgcccaggctggagtgcaatggcacgatctcagctcactgcaacctccgcctcccaagttcaagcgattctcctgcctcagcctctcgagtagttgggattataggcacctgccaccacacccggctaatttttttgtatttttagtagagatggggtttcactatattggccaggctggtgtcaaactcctgacctcatgatccacccgcctcggcctcccaaagtgctgggattacaggcatgagccactgcgcccggcctatctttgctttttacttttctccaagtacattcaaacctattattattttaagtatttaggttattgttctggtaactaaaggatacttgataggtttatggatttgcttgaacttaacgcttgcatgagccctttgtaacttggttttttctttctttgcattaataggattttactaacattctcaggaagtaggtacaaagaattaaaatttttaatctatataagctgttttcactaaaaggaactagagtttgtatacaaatagctaatttcagatttgtgataggaaatgtataatatatgagcctagagatcttgtcataccagagagtaaggaagctgttaaagatttctgaggttgtcaaaaggtcttagtagccaacctccccatcttcaaaggtggcataatttgagcatcaaaaagaataatggccataatggattaaaacatatcaaatatattaaaacttacgaactcataaaaatttcataggtctcctttggatcatgctagggaagcaacacattgtcctgaaaatgggtaaagaagaagaaaaaatttagcatccatctgtctttcctaaaagaaccatatcttggtttagcagggtaatgaagaaaagtgtttcattagactctaagctaataaaatggagaagaaatgatagaattaatatatcaccagtatgcaactcttaataaaataacccctgtggatgttaatgatggcttaaaccatttgatcaaaagctgttggggaactttataattaataggctaaccatacctgaactcactgataaatcttaacatgagagacacagcaaagcattttgtgcttgcagtactacctatgaaatactcttgctaaaaaattaaacctgaattaaatcaagcctttaggtctaaccagtttgtagaaaataaagcatagaaatgcagttgaccaaatccagaatttgagatgttcaatggggtaaagacctcatgtcttcagcaacaagttttttttttcaagggaaaaaatatgagaaacaataacctgtatatcaaaagagacttaagactagaggtccttaagtcttagtttgcctgagacagtccttgttgatattgttgtattagaatgattattaagaatgggccctttcactccaaaaggtgtcccaatttggatgataaattatatagtcaccgacttaagacctatgaaccaaatctagtggtgaattctggttcaaacaaagcaattgtgacacacatttgagacgactggtgaagtttgaacatggactagacatttgataggaaggaatcagtgttaacctttttagatgtgatagtggtcttaaagtgctcttacctcttagagatacatgctgaagtaaatggatgaaatgatacaggatttgtttcaaaataatcctgggtttatggaggagttgagtggccagtcctgttggtaaatgtctgtactccacttgttggtaaatgttgaagctgggtaatgaatacaagggagttaattatactgttctctctacttttgtatgtgtttttaaatcttttattactgaaggccaggtgtggtggctcatgcctgtaatctttggaggtcaaggtgggcagattgcttgagcccaggagtttgagaccagcttgggcaacatggtgaaatgccatctcttcaaaaaatacaaaaattagccaggcatggtggtacatgcctgtagtcccagctacctgggaggctgaggtgggaggatggcttgagcctgggaggtcaaggctgtagtgagcactactcatgccactgcactccagcctgggcaacagagtgagacttgtctccaaaaaaaaaaaaaattatggaaaaggtaagggaaaatatgatgttgaataaaacactggcaactttaattttagtaataaatatttatttgcatcatttacaggttgtaagccaatgttgtgaggcttcaagttcagacatcactgagaaatcagatggacgtaaggcagctcatgagaaacagcataacatttttcttgatcagatgactattgatgaagataaattgatagcacaaaatctagaacttaatgaaaccataaaaattggtttgactaagcttaattgctttctggaacaggatctgaaactggatatcccaacaggtactttaaaagagaaatagaattgttaaattttttgaagtcgaattcaactctatgtagtgtcagatgttcagaaaaattaggtcctgccattgcctgacagaaatttaacatctcactgtaatcaactcaaaatgggaaaactggaaccttaaaatagttttaatcaagtgtcatgatacaggtggtatcacaattcagtataatttcacatactttcagggagttgactttgttaataggggattttttaaaacaaatacaaacctagcactgtttgtaaaaggacattttaataccacaaatatgggagagatgtaactgactaaatctagtttaatgcaaagtttaccacattgtgcattttgttctgtgtccctctcattttgtcatagactattgccatttaggaatccctgttttaagagatcagggatcaccatggaccattagcatttaggaatcaacattttgagagatcacatatggcaaagatcattataggctgtaatgattcagggaggtcttcatggaagagatgtaacaagctgttttacacagcatgaataattgggttcttcattggattatggtaatggttgcacaccctgtaaactcactaaaatccactgaattgtacacataaaatgagtgttttatggtatgtaaattatatcacaaaaccttttttttttttaatttaaaaagcaattgttaaaaggggatggtgctacaggtatttagctcgnactccaaaaagcagttttatgnctcttaaccnnnnnnnnnnnnnnnnnnnnnnnnnnnnnnnnnnnnnnnnnnnnnnnnnnnnnnnnnnnnnnnnnnnnnnnnnnnnnnnnnnnnnnnnnnnnnnnnnnnntttgtaaatcatgagagcatgagcttattacacacaaatataactgggggcctgatccgatggctcacacctataatcccagcacttcgggaggcaaggcaggaggatcgtttgagcccaggggttcaagaccagcctgggcaacatagtatatgtatataactagttaatatttaaccaccacaccacatttatagtgaaatgattactcctatcaaagtaatcatgttgggaaatctactcattccaataatgctgccatttttttcagaacactataactccttttagagcttataacacatcttttatatatcctcagagatggtaaacttcatgttttagagagtaggatgaatcttgaaaacagtaaagtctgtcatcaaattagaaagtattgttagttgcaaacaatgtctgacaggtagcaagactgatcctcatatatggcaattatatttttatatttttagaagacaagattaattaggaagttttaggtttttttaaaaatatttacatctcatactttaatttttacctcttatctaatgtccgttaaaggtacgacaccacagaggaaaagttatttatacccatcaacactggtaagaactgaaccacgtgaacatctccttgatcagctgaaaaggaaacagcctgagctgttaatgatgctaaactgttcagaaaacaacaaagaagagacaattccggtaaatttaaaggatcatattttataatagaactcttttatgaactcttgatgtggctgacttcatgtgaagaattttactgtttacccctcaatcttaccccgcctctcattaatgataggcctagcccttaggcttgtttcttttaatcttactagtttttaaattatgctagtagataataatagccaatacttaatattgtgcttagtaacattgttatataggaacctctactctctataaaaatatattaggaattattttcattaattggtagactttctaataattttgttgaggtttaacttttatattataccatgggcattgggttatactcaaagctagtgttactctagagatgacttttaagcccttggacttagtcactcatccagtttcttcttttaggatgtggatgtactacagccagttctggggcagtatacttaagaacctttaagtcaagagccatctgtagatgctggtgtggattgttcatcaattggcggggttccatttttccaggtatgtcatatcagataacccttccacatctgatgtaagtcattcatttactattcattataaaggtattgttcgtggtgagcagaacaacaaaaacctttcaattattccttaggatggcttgttaacgcttatgatttgaattatttacaaaaatctgatattgataaggggttttctgtagaataaatgaaggcagaatttgacttaatctacatccttagctgataatctttagctattgtatttattccttttctgcttgctatatactcagacactgagagcagtcatttctcttccttctacctttgacatgtaagtcttggaacctatctctgcccataatcagactttgaaggcaaagtgattgaaaagattgagagactggaggcctcttaggttatattagtgatttctcctgcctgaggctcttctcttgtaaactgttgccccatgtttcctgagcaccttgcctgctctaatccagtgtaattaaatcctgtgacctctcctacccactcttcttttttttttgagactgagtcacccaggctgaagtggagtggcacgatcttggctcacttaacctccgcctcctgagttcaagtgattctcctgactcagcctcccgggtagctaggattacaggcatgcaccaccacacctggctaatttttttgtatttttagtagagacagggtttcactatgtgggccaggctggtctcaaactcctgacctcaagttatctaccctcctcggcctcccaaagtgctgggattacaggcgtgagccactgtgcccagccctctacccacttttttttttcttttgagacggagcttcgctcttgtttcccaggctggagtgcaatggcacgatcttggctcaccgcaacttccacctcctgggttcaagtgattctcctgcctcagcctcccgagtagccaggattacaggcatgtgccaccatgcctggctaattttggttttttttttttttttttttttttttttttttttttttttagtagagggggtttctctgtgttggtcaggctggtctcgaactcccaacttcaggtgatctgcctgcctcggcctcccgtagtgctgggattacaggtgtgagccaccggcccggcccctcctacccactttttaacactgttgagaacatagttggtttatgattcatctcagcattgatgactgagtacacaatcaatgtcaccagtcccttaatgttctctatgggtaagtaggaggattccaatgaaatacaacttccaagtgaggctctataaagtgctggtatcttttcctctaatttgagggtacaagcctagacagagtgtgtgaaggaaaaatttccttacgtaggacattggtatctacatttacagttgaagttctacttctgagatgcatatgcttgtaccttttttttttttttttttttttaaatatatatagagagagggtcttgctatgttggccagactggtcttgaactcttggcctcaagcagccctcctacctcagcctcccaaaatgctaggattacaggcatgaaccactgcgcctggctgcttgtaccttttttgtgtgtatgtcttgttttgtttttttgtttttgagacggagttttgctcttgttgcccaggccagagtgcaattgcctgatcttggctcaccacaatctccgcctcccgggttctagcgattctcttgcctcatcctcccgagtagctgggattacaggcatgcaccaccacacctggctaatattgtatttttagtagagaaggggtttctccatgttggtcaggctaatcttgaactcccgacctcaggtgatccgcccgcctcggcctcccaaagtgctgggattacaagcgtgagccaccgcgctcggcctgtaactgttttttaatagatctacagctccttcccttaaggtctaaagattctccatccctgctttcaacagttaacaaagttccaactcagattctcataaattcctccctgtcttcctctgggcaattttattcccaaattcttgccaccttttgctttattccttactattagagaactataaatatgtttctttcagttttcatccttttcttctatcttataaagttaggaaagggggaaggataagagaacctggtgactacttaatccctggtcagaaatcgttttattattattatctgtggcattttgaattaggcttagtgattcagctatggcaaggaagtccctacagtaccagaaagggtttgggatggggttttagaccttcagctgaagtccagaaatgatcttttccctagtagcagtgtgatgtggggattttctctgcgtttaaaactttaaaagttggtttacaatttgtctcagcattgatgactgagtgtacaatgaatgtcaccagtccattaatgttctgtatgggtaagtaggattccaatgaaatagaacttccaaatgaggaatatgaaataggttttacaaataaaataaaatacaattttaaaaaacaagtaaaagtgtttttaaggtggcccatataccagtttctctgcttaaaacagaattggcttttctgcatgacagcaaatctttgtttccttagagcagggtttcttgacagcagtgctattggcattttaaactggataattctttgttgtgatgggctttcctgtggactgtactatgttggtacacaagaaaaacagtgtactatgtgaatactcactcaaagccagtagcactccctgattgtaacaccaaaaaagtctctcagcattgccaaatgtcccctgtggcagcagaatcactccctgatgagaaccactaccctggagtaaaatctataactatgtcttagaaaataacacagaaaattaatatttctttcactctactccttccattagtgatcaaataaagaaggcatttggcgctacttgccaaattgttggctcaaacttgtgctgaaccttttttggttttctacacttaagtttttttgcctataacccagagaactttgaaaatagagtgtagttaatgtgtatctaatgttactttgtattgacttaattttcccgccttaaatccacagcataaaaaatcacatggaaaagacaaagaaaacagaggcattaacacactggagaggtctaaagtggaagaaactacagagcacttggttacaaagagcagattacctctgcgagcccagatcaacctttaattcacttgggggttggcaattttatttttaaagaaaacttaaaaataaaacctgaaaccccagaacttgagccttgtgtatagattttaaaagaatatatatatcagccgggcgcggtggctcatgcctgtaatcccagcactttgggaggctgaggcgggtggattgcttgagcccaggagtttgagaccagcctggccaacgtggcaaaacctcgtctctgttaaaaattagccgggcgtggtggcacactcctgtaatcccagctactggggaggctgaggcacgagaatcacttgaacccaggaagcggggttgcagtgagccaaaggtacaccactacactccagcctgggcaacagagcaagactcggtctcaaaaacaaaatttaaaaaagatataaggcagtactgtaaattcagttgaattttgatatctacccatttttctgtcatccctatagttcactttgtattaaattgggtttcatttgggatttgcaatgtaaatacgtatttctagttttcatataaagtagttcttttataacaaatgaaaagtatttttcttgtatattattaagtaatgaatatataagaactgtactcttctcagcttgagcttacataggtaaatatcaccaacatctgtccttagaaaggaccatctcatgttttttttcttgctatgacttgtgtattttcttgcatcctccctagacttccctatttcgctttctcctcggctcactttctccctttttatttttcaccaaaccatttgtagagctacaaaaggtatcctttcttattttcagtagtcagaattttatctagaaatcttttaacacctttttagtggttatttctaaaatcactgtcaacaataaatctaaccctagttgtatccctcctttcagtatttttcacttgttgccccaaatgtgaaagcatttcattcctttaagaggcctaactcattcaccctgacagagttcacaaaaagcccacttaagagtatacattgctattatgggagaccacccagacatctgactaatggctctgtgcccacactccaagacctgtgccttttagagaagctcacaatgatttaaggactgtttgaaacttccaattatgtctataatttatattcttttgtttacatgatgaaactttttgttgttgcttgtttgtatataatacaatgtgtacatgtatctttttctcgattcaaatcttaacccttaggactctggtatttttgatctggcaaccatatttctggaagttgagatgtttcagcttgaagaaccaaaacagaaggaatatgtacaaagaataaattttctgctcacgatgagtttagtgtgtaaagtttagagacatctgactttgatagctaaattaaaccaaaccctattgaagaattgaatatatgctacttcaagaaactaaattgatctcgtagaattatcttaataaaataatggctataatttctctgcaaaatcagatgtcagcataagcgatggataatacct

SEQ ID NO: 348 - DNA, 63824 bp, Homo sapiens
  allele 300: Insertion: CA following nt 299
  allele 1152,15104,20815,35719,36738,36739,42125,45083,45887,56706,56887,58524,62661,63802: N is any
  allele 14235: Insertion: T following nt 14234
  allele 41015: Insertion: AATTT following nt 41014
nnnnnnnnnnnnnntcccagcactttgggaggccgaggcgggtggatcatctgaggtcaggagttcgagaccagcctggccaacatggtgaaaccacatctctactgaaaatacaaatattagccgggcgtggtggcacgcacctgtaatcccagctactcgggggctgaagcagcagaatcgcttgaacctgcgaggcggaggttgcaatgagccgagatcgcgccactgcactccagcctgggtgacaagagcaagactccgtctctcacacacacacacacacacacacacacacaaagactattctggtctctgcctccgggatggcggctcgctttggacctctcttctgtgcttctactgccctctcttacaattctctaataattataatcatggcgagtgcttaccatatattccaatctatttacttccacaagctcattaattctcaccctaaccctctgagatggttactattatttcctctctgcagctgagggaattttgggctagggacgttatgtaagttgagccacgctacgctaaaagttccacactcaattctagcgtctcggctctggactaccaagttccggagcaagcagacagaccacctctttacgttcccgtaggccacgctccgggggcggggctccagtgaggatactgcatcccatggtgccttgcgcgccagcgcagccattggtccggctactctgtctctttttcaaattgaggcgccgagtcgttgcttagtttctggggattcgggcggagacgagattagtgatttggcggctccgactggcgcgggacaaacgccacggccagagtaccgggtagagagcggggacgccgacctgcgtgcgtcggtcctccaggccacgccagcgcccgagagggaccagggagactccggcccctgtcggccgccaagcccctccgcccctcacagcgcccaggtccgcggccgggccttgattttttggcggggaccgtcatggcgtcgcagccaaattcgtctgcgaagaagaaagaggagaaggggaagaacatccaggtggtggtgagatgcaggtagggagagggctgacaggattccgagcgctgcggcttcgctgctgggccccctactgcgcggtccanggagagggattttatttgcatttcctgagggtcccagtttcttggttctccgcgttctgttcaataaaaatgacacccggttgctgtgtgtatgtggtttttaggagaaaataacatgtttgatttgatcactgttccatactgaaaagtgcgttcttatgtttaaactatagtcaataaagatgtaggtgtcacttttatatgctacttcatgtagtttgtcagtttggaagtaagactgaatacctattttgcagatggttaagcacttacgttggtattattacctctaaaaagcaatcaatcactgttctctttattctagatgcaatattttctgcatccctactaaacaagtaaacatctctgtctttaaacattaaaaattaataaagtgagtttatgttttttaaaagatcaagacaagttaagctagtgtaaatttctgattgtgctgcagttttccctttcatctgcgtgtttgttcatagaccaaactaaacggatatttcgagataaagggatgtggaggggtgttcggccctcccctgactggtttccaaataacttcccaattttaaaataagctagaaactgctgcttagttagaattgatttattcaactttttagaggctctccacagtttactgagtatgtgtgttttgtgtgtccgtttttgtggctgttaacagttgctgttgcaacttttctgtaaaccccaaagtattctaaaattaaaaggttattttttagaaaaacttgtatcaacaaactttcttaggctattgtttactcagccctggtaacttgaattgtggatatcgaaggtgatgactaggtttctaaacaaggtgtcagagaggaaattgggtggcaatcttaagtctagccagtgacacttactagttgttgtactctggggcttctgttagtagttagttgtttgaagatttttatttaaaaatgcagtgcatataacaagtgcaaattttaaaattattttggttgtttaataaaaccaggcaatattaccttttccgtatgcatttatttaatttcttttttaatgttagttacaaaatatttcagacttacaaaaagttattaagaacaatgtaataaacatttgtatattcatcacccagattaagaaacaaaacaatcattgctggagccccccttttccctctccatcccttttcctccagccactgttaaccattatcttgaacttgatgtttatgatccgtatacatttcaagtcttagaagagatttactttatcaccaatgaatagaatagttctttgcttgtgtctaatatttacaataatttttgtgtaaagagattttttttttcagattagcctttttctttcaaatagccttcctggtgcgtctgtcattaagcattaagctttagtaaataggcaacttatgagttgcgaggtcctcaggggttggtaagccttttctgtaaagggcccagagaaataaatatttattttatttaaatactttaggctttgcagatcacatgtggtttatcagttttttttgagacggagtctcgctctcttaggccgtagtgcagtggtgcaatctcagctcactgcaacctccgcctcccggattcaagcaattttcccacttcagcctctcaggtagctgggattacaggcgcacaccgccatgcctggctaatttttgtatttttagtagagatggggtttcaccatgttggccaggctggtctcgaactcctgacctcagagaatccacccaccttggcctcccaaagtgctgggattataggcgtgagctactgtacccctttacatgtggtttctgtcacattattttctgatctttttttttttaagaacactttaaaactgtaaaaatcattcttaaatctgtcagggcaggggccaggtttgacccacaggttaaagtttacagatccctacataatgcgctactggttctctttcttatgtccctcctattccatcccctatttttttcccaatttaaaaagtcattttcaaacacacataatataaaatttaacatcttaaccacttttaagtgtacagttcagtgatattaaatacataatattctgcaacaattactaccatccatctccataactcttttcatcatgaaaaactgaaactctatacacattaaacaataactccccatttccctctcccatcaacccgacacctaccattcgactgtcttatgattttgactactctaagtacttcataaagtggagtcataatacagtatttatccttttgtgacttgctcattccacttaggcataatgtcctccaggttggaccatgttgtagcaaatgtcagggttttcttcctttttaaggctgcatagtatttattatatgtatataccacattttgcttgtcccttcatatgtcaatggatacttgagttacttctttttttgttgttgttgtttttgagaccgagtctcgctctgttgcccaggctggagtgcagtggcgcggtcttggctcacactgcaagctccatctcccgggttcacgccattctcctgcctcagcctcccaaggagctgggactacaggcgcctgccatctctcccggctaattttttgtatttttagtagagacggggtttcaccatattagccaggatggtctccatctcctgaccttgtgatctgcccgccttggcctccctaagagccgggattacaggcgtgagctacggagcccggccttgagttacttcttacttttagctattatgaataatgttgctatgaatatgggttttcaattcttttgggtatttacccagaattgtaattgctggatcatatgataattctattttaaagtttttgaggaaccgacaaactattttccacagtggctggaccattttacattcctaccaacagtgcataagggttccaatttctccacatcctcaccaacgtttattttctgtttcttttttttttttcaagtagccatccattgggtgtgaggtgctatctcattgtagttttgatttgtatttccctaatgattaatgatgttgagcatcttttcatgtgtttactggccattttgtgtatctttggagaaatgtctgtttaagtcctttgcccatttttaaattggtttgcttttttgttgttgagttttaggaattttctatatattttggatattttcagatacataaacggcaaaaattttttccccattactgtggtttgcctttttactcattgataccgtgtggtcttttcctttctttttctttttggaaccagtgcatggcctctttgttgattctgtgtttggccccagtgcagcctgttctgtgctatgtgtctgcagtgctgaaaccaggcctacccagcaccatacagaagtccaggctgtagataccaatgcatgggtcacatttgatacccaaatctgtgtgttcctggatctccaaaccaaagtttccagtatctgagaagttgttctttcttgattcacactcctgcatctttagacctttcttcagggtttcttctgctttggccctttgtgcagtgggtggcaatcttcacttctcctgatgccaaaggatctgacaatgtatttgactttggagaacacaggggtctggcctatgagctgctccaacaccttggctgctggggtcagtcatctccagtctcctccatacagatgttgagacagaaaatcgttctgtcacccaggctggagtgcagtggcacagtctcggctcactgtaacctctgcctgtcaggttcaagcaattcttatgcttcagcctcccaagtatctgggattacaggtgtgcaccaccatgcctggctaattttttgtatttttagtagagatggggtttcgccttgttggccaggctggtcttgaactactggcctcaagtgatccacccattttggcctcccaaagtgctgggattatgagtgtgagccctcatctggccagagttctcttttttttaccttgatcttgcactatgatggagaaaaggaagataaagtctttttttttcccttgggtttgtttgtttgtttgtttgtttgttttttgagacggaattttgctctcgttgcctaggctggagtgcattggtacgatcttggcttactgcaacctccgcctcctgggttcaagccattttcctgcctcagcctctagagtagctgggattacaggcatgcgccaccacgcctggctaattttgtatttttagtagagatggggtttcaccatgttggtcaggctggtcttgatctcctgatctcaggtgatccgtccaccctggcctcccaaagtactgggattacaggcgtgagcccgtgcctgggctattttttttttctcccctttaaatatagtatcttgctttattgcccagacttgttgtgaactcctggactcaaatagtcctcctacctcagccttccaggtagctgggatcacagggatgctgtcttttgatacacaaacattttaaatttttatgaagtccagtttgtctttttgtttttgttccctgtatctttggtgttatatccaagaaatcattgccaaatccattgttgtgaagcttttgccttatgttttcttctaagagttttatagctttaggtcttacatacatttttgatccattttgagttaatatttgtatattgtgttagataagggtccaacctcattcttttgcatatggatatttagtttcccagcaccatttggtgaaaagcttgtctttttctgattgaatggtcttggcaaccttattaaaaatcatttgctcatatgtaagagggcttatttctaagtgctgttatgttccattggtctataagtctgtctttatgtcagtaccacatggttttgattattgcagctttgtagtaagttttgaaatcaggaagtgtgagtcctccagctttgttctttttcaagattgttttggctatctggactcccttgggattccatatgaatttgaggatgaatttttctatttttgtaaaacacgtcattgggattttaatagggattacattgaatctatagatcactttgggtagtattggcatcttaacaatattaagtctttcagttcatgaacaagggatgtgtttccatttatttatgccccttaatttctgccagcagtttttttttgtttgtttttgttttgagatggagtttcgctcttgttgtccaggctggagtgcagtggcacaatcttagctcattgcaacctccacctcccgagttcaagtgattctcctgcctcagcctcctgagtagctgggattacaggtatgtggcaccacgaccagctaatttttgtatttttactagagacaaagtttcaccatgttggtcaggctggtcacgaactcttgacctcaggtgatccacccaccttggcctcccaaagtgctgggattataggcgtgagccactgcgcctggcctcagcagtgttttatagttttcattttataagtctttcacctccttggttaaattaattactaatattttattctttttggtgctattttaaattgagttgtttttgtaatttcctttttagattgttcattcttagtgtataaaaatgtaactggaggctggacgcagtggctctcacctgttatcccagcactttgggaggcaaggtgggcctcccaactcctgatcacgagatcaggagttcaaggccagcctggccaacatagtgaaaccctgtctctactaaaaatacaaaaattagccatgcatcgtggcgcgtgcctgtagtcccagctacttaggaggctgaggcaggagaatcgcttgaacctggaaggtggaggttgtggtgagccaagatcgtgccactgtactccagcctgggcaacagagtgagactctgtctcaaaaaaaaaaaaaaagaaaaaagaaacgtcgctggattttgcttgttgactttctatccagctactttgctgaattcacttattagttctaacagtttttttttgtgtgtgtgtaattttagagttttcttttctttttttttttttgagatggagtctcgctttgttgccaggctggagtgcagtggcgcgatctcggctcactgcaacctctacctcccaggttcaagcaattctcctgcctcagcctcccgagtagctgggactacaggcacacgctacgacgcccagctaatttttgtatttttagtagagacggggtttcaccatgttggccaggatggtctcgatctcttgacctcgtgatccacctgcctcagcctcccaaagttctgggattacagccgtgagccactgtgcctggcttttttttttttttaattaactattgaacttctgtttattattattattattatttatttatttattattttttgagatgaaatctcggtctgttgcccaggcgggagtgcagtggtgtgatctcggctcactgcaacctccgcctcccgggttcaagcaattctgtgcctcagcctccggagtagctgggattataggcgctcgccaccatgcccggccaatttttgtatttttagtagagatagggtttcatcatgttggtcaggctggtcttgaactcctgacctcgtgatccgcccgcttcggcctcccaaagtgttgggattacaggcgtgagccactgcacttggccttatttttattatttttttcatcaacttttaagttctggggtacatgtgcatgatgtgcaggtttatcacataggtaaacctgtgccatcacagtttgctgcacagatcaacccatcacctagctattaagcccagcatccactagctattcttcttgatgctctagctccttttgccccactgaattttagggttttctttcttttctatttttttttcttttgagacagactctcgctctgtcaccaggctggagtgcagtggcacaatcttggctcattgcaacctctgcctcctgggttcaagcgattctcctgcctcagcctcccgagtagctgggactacaggcatgcgcccatgcctagctaagtttttgtagttttagtagagacagggtttcactatgttggcaaggctggtctcaaactcctgacctcaagtccccttggggttcctgaagtactgggattataggtgtgagccaccacgcccggccagattttctatataaaagatcatataatctgcagacagataattttactttttccttttctttctttttttctttttttgagatggagtctcgctctgtcgcccaggctggagcgcggtggcgccatctctgcttactgttacctctgcctcctgggttcaagcagttctctgcctcagcctcccaagtagctgggattacatgcacatgccaccacgcccagctaatttttgtatttttagtagagatgggagttcatcatcttggctaggctggtcttgaactcctgacctcgtgatccatccgccttggcctcccaaagtgctgggattacaggcatgagccaccgctcttggccctcaaccttttccttttcaatttggatgccttttatttttatttttcttccttttttttttgagatggagtctcgctctgttgcccaggctggaatgcagtggtgcaatctctgctcactgcaacctacgcctcctgggttcaaacgattctcctgcctcagccttccgagtagcttgtactacaggcatgtgccaccataaacagctaattttttttttttctcgtatttttagtagagacggggtttcgccgttttagccaggctggtctcgatctcctgacctcgcgatccgcctgcctcagccttccaaagtgctgggattacaggcgtgagccaccatgcccggcccttgtttttctttcttgcctaattactctagctagaacttacagtattatgtcgaatggaagtggcaaaagtgggcattgggcatccttgtcttgctcctgttcttttatttgttagtttgtttgagatcctcctgcctcagtttcctgagtagctgggactatagacacactactacacccagctaattaaaaaaataattttttttttttttttagagatggggtctcgctatgtttcccatgctgatcctgaactcctggcttcgggtgatcctctactcttaccctcccatagtgctgtgattacaggcatgaaccactgtgctggccctgttcttgtttttagaggaacattcttcagtctttgaccatcaattatgtttgctgtgggtttttcatatgttgcttttattttgttgaggtagtttcactctattcctagtttgttgagcatttttatgactaatgggttttgaattttgtcacatgcttttcctgcatcgattgacatgattctgtggtttccttcattctgttaatgtggtatattacattgatcaatttttacatgttggaccatccctgtattccaggaataaatcccacttggtcatggtgtataatccttgtgctgctcagttcaatgtgttggtattttgttgaggatttttttttatcagtgttcataagggatagtgatctgtagttttcttgtagttgcctttgtctggctttggtatcagggtaatgcttgcctcacaaaatgagttgggaagtgttctctcctttgccagattttttctgggaaaagattgagaagaactggtattagatcttcttgaaatgttttatagaattcacctatgaaactatcagatctagggcttttctttgtcaggagatttttggttagtgagtccatctctttactggttatagctccattcagaatttccatttctttgtgatttagtctttgtaagtattgtgtttctaggaatttgttcagctgggttatccgatttgttggcatacaattgttgaaaatactctttcaacaataagagagaagacacaaataactagttcttttgtttccagttccttaagttgtaaagttagggtgttgatatgagatctttcttgctttttaatgtaagcattcatagctataaatttcccccttagcactgcttttgctgtgtcccgtaagttttggtatgttgtattttcattttcattaatctctaaaattttctaattttccttgtgatgtctttgaaccctggttacttaaacacacacacacacacacgtgtgtgtgtgtgtgtgtgtgtgtgtgtgtggttttttgtttgttttgagactgagtttcgctcttgttgcccaggctggggtgcaatggcgcgatctcggctcactgcaacctctgcctcccggttcaagcgattctcctgtctcagcctccagagtagctgggattacaggcgcctgccaccacgcctggctaatttcacacacacatttaaaaaatacatctacctgcttttacttcagaatctttgcaatttctgttctctctgcctgaaaattttttccaccaaaatatctacagggcctggctcccttgctttttaggttctgcttaaatatcacctgcgtagaagcattccctaactaccctaaaatagcaaccaactatcttccaccctcaacacttcctatcccccttaaactgctttcttttcttttctttttttttttttttttttgagacagagtctcgctctgttgcccaggcctggagtgcagtggcgcattcttggctcaccgcaacctccacttcagcctcccaagtagctgggactgtaggtggctgccaccatgcctggctaatttttttttttttgagatggagtctcactctttcacccaggctggagtgtagtggcacagtctcggctcactgcagcctccatctcccaggttcaagtgatttctggctaatttttgtatttttagtagagatgaggtttcaccatattggccagggctagtttcgaacttctgacctcaagtgatctgcccaccttggcctcccaaagtgctaggattacaggtgtgagccactgtgcctggcctaatttttgtatttttaatagtgatgggtttttactatgttggccaggctgatctcaaactcctgacctcaagtgattcacccacctcagcttcccaaagtgctgagattacaggcgtgagccactgtgcctggcctgctttattttcatttctaatttatcagcatctaatatatttattcattttatagtcatctcttccttcaactaagttaaaagctccctgagcacaggattttggtgtttttttctttcctttaactttgtattgttcattgctgtatctccagtgtctagaaaattacctatcacatagtaagtacttgatgaatatttgtggaatgagttaatttagcacttctccacaggataggacttaggtttttttaatcctcaatctcccttccctcaccattttgattgtttgaatttttatataactatggtgaagccaacaaattgatggatttgttagtgtgagcagccgaaactttgcaatttctaataagttagagaagtctgggtaggaaactaatgacttggcagtactctttcttagagtacacatagtccctaaagcttctctgagaattttgataactttgaggaatgtgtgatctgtatgaatttcctatcacttagtcctgacaatgtgaatggtattcatttggtaacttaattttatacgtccaggcaagatactagtttaggggatgccaaaaataatagactaattggaaaagctttagccacatgagagcaattcactccacttgatgctcttggcctacctcagtataagttggttctaccttagttttgttgaagttttaataatactgtacattcatgttggttatatgcattgtgtaagttttagtatagttggcaaatgaaagcattaccagatactacctgggagttaagtttcctaggatcacagatttggtcttctgatcacttggaagtatacttagagtgggctgtgccaggggaagttgaggtatccttcttaaataagtagcaacttggtttatctagtgataagggggaaataatttcctgtttggcactttctccaaaatatatgatactcaatgggaaaaatgaactcaggtcaagattatgtctctccctttggcccagacatgtattgagtatataattgtcttattgatgctactctgtggactgtgatattagttttcccataattcctcttaggatgacatttattaggcaatgtagtttaacagatatttaagaacctactgtgtgctaagcatggtagttgttgctggggaaacagtaaactagacagtatttctttctgtagtgatctgaggtttagtgggtaacacattaaaaaaaaaagataagagaggtgatgtttagaaaaggtgtataaagggtgctgtaggaatatatagcagacatttaatgtggtcttggttggagcaggtgggggaggcacataggatagaaaggacttcctgaggaaataatcatttcaactaaatacctactcaggcatttccgtagaatgaggactcttgatccagtcggcagtgtagaccttctgtgtctattcactcatttaaaaatggggctaataatattaccaacctcacagtgttgtgtggacaaactgagtgagcacaatgcaaagcacttgaaacaataagtacctggcacatagtaagtactcaacttattagtcattatttttatgtactttttattttgtgccaggtatctactggcagattagtattttgaacacaaatttgacatgtttttttctactacatcataacctaatttgatcggatttttttttttttttttttttgagacggagtttcgctcttgttgcccaggctggagtgcaatggcgcgatcttggctcaccgcaacctccacctcccaggttcaagcaattctcctgcctcagcctcccgagtagcagggattacaggcatgcaccaccatgcccagctacttttgtatttttaatagagacagagtttctgcatgttggtcaggctggtctcgaactcccgacctcaggtgatccgcctgcctcggcctcccaaagtgctgggattacaggcgtgagccactgcgcccagccttgatcagattttaagaataggagaaatggaattctgaaaaataagtttggcatttttacaagttaaaacctgttagtggctgggcacagtgtctcacttctgtaatactagcaccttgggaagctgaggtgggataatcacttgagcccggaagtttgagaccagcctgtgcaacacagcaagaccccatctctaccatcaaaacaaaacaaatctattcgtatctgctctaagaagctgccagaattgtaatgtcttaacatatctttgaacatttaaaaaattatatttgtgaaacttgagacacttataattttactgtctgctttagcaatatcacttagtcctgatttaatctccatcaccaacaatgtggtcaaaatttcgcatttttcttgacaaatgtagttagtgaaaatgtcattgataacctgagaactaagagctcttgaatgactttgtgtatttctttttatagaccatttaatttggcagagcggaaagctagcgcccattcaatagtagaatgtgatcctgtacgaaaagaagttagtgtacgaactggaggattggctgacaagagctcaaggaaaacatacacttttgatatggtaacatatggtgcaatttctttattatccactaatgtaaaataattttaatatacatattttacctggaaaatggtgtatacttagaaatttcagttgtctctgaattgtcagatggcttctagtgggctgaattatgaattagttaacatacgaaaaacaaaattattaaaatgagtaattttgaggttgatttttttttttttaatttttttcgttaggtgtttggagcatctactaaacagattgatgtttaccgaagtgttgtttgtccaattctggatgaagttattatgggctataattgcactatctttgcgtaagtaaaagggtgttttttctgatttatgaaaaagcttaaatgcttgtgttttttgttgttgtttgtttgttttttgagacggagtttcactcttgttgcccaggctggagtgcaatggcgcgatctcggctcactgcagcctctgcctcctgggttcaagcaattctcctgtttcagcctcccaagtagctgggattacagctgcctgccaccatgcccgctaatttttgtatttttagtagagacgtggtttcactgtgttggccaggctggtctcgaactccggacctcaggtgatccgcccacctcggcctcccaaagtgttgggattataggcttgagccactgtgcctggcttgttttttgtttttctagtctatcactaagagtcatatgggtgcatgtttctttttgatttaacacttgttaatctttacaggtatggccaaactggcactggaaaaacttttacaatggaaggtgaaaggtcacctaatgaagagtatacctgggaagaggtatttattgtttataacatacttttatctctaatgtgactgaaatttaactgtataaaacttgtttgagggcctctgtcttggaatagagatcagagtacctatgtcaaaatgaacttaggataaaccactactacagtaaaattaaagtgcatggtatgactcctgtttaagaaacagcctcaatggaagaggaaggaccaatatatatggcacagttatatgataaaagaggngtctatttatgacagaatggttggagcagaatattgtagaaaagttggaatatgagtgaagcttgaaggcagggagggctttgtattgaaggaatgggtctcagaaagttagcatggccaggggaagtatagtactttattcatgatgatcctaagtgttcaagaaattaagatgaatgtattgtttaatattgcagaaagcatatactatgttttacaaagatttccatgaatttaagtgagtttaataactaagagagagaaccaatactggaagaaagttgaaagaagaccaagacaagttgaactagagctgaagtgttaaaacttttaaaaaaaagtttagttttaaatttagtaatgtgtttaaatttaaatgagtttaataactagttaattggtcgggcacggtggctcatgcctgtaatcctagcactttgggaggctgaggcgggcagatcacctgaggtcagcagttcgagaccagcctggccaacatggtgaaacccggtctctactaaaaatacaaaaattagctgggtgtggtggtgcatacgtgtaatcccagctacctgagaacgagactctgtctcaaaaaaaaacaaaaaaacaaaaaaccaaaaaactagttaatttaaaaaaaaaaagaattttttttaatttttttttttttttttaaattttaaagtgatggggtcccactgtgttccccaggccagtcttgaactcttgggcttcaggagtcctcccacttcagcctcctgagtagctgggattagaggcacatactaccttgcccagctaattttccaaattattgacagttgggtagaacctttcttctagtggttacataattgagtcattaacttactttacatatatagataataaagttatgaaattgttaccataggagatatggaataggcttaaagcatagtttcgctgggcagaattattgaacttggcgttttttttttgagacggagtctcgctctgtcgcccaggctggagtacagtggctcgatcttggctcactgcaacctccacctcccgggttcaagtgattctcctgcctcagcctcctgagtagctgggactacaggtacataccaccaagtccggctaatttttgtatttttagtagagatggggtttcaccgtgttggccgggatggtcttgatctcctgaccttgtgatccacctgccttgacctcccaaagtgctgggattataggcgtgagccaccgtgcctggccgaacttggctttttaagtagataggttccattggtttctatgtaatgctcagggatgaagatggctaagaagtgtgacaggtttatggagggtgtgaagactactgtagaacagactgttgtaaatgacttctctaacattaggttagttgtttctttttttgttttgttttaacttgctttgccatacttatgtttaaatatattataaaggaggcccatgtattttaactgccacagtaaatggcattcttcctttatattagtccttattataatttcaggatcccttggctggtataattccacgtacccttcatcaaatttttgagaaacttactgataatggtactgaattttcagtcaaagtgtctctgttggagatctataatgaagagctttttgatcttcttaatccatcatctgatgtttctgagagactacagatgtttgatgatccccgtaacaaggtaattcagtctttgagaatgaaatgtctctgaattttaatgtgtgaggctttgagaagtcagagagagagagagagagagagagagagagagagagagtgtgtgtgtgtgtgtgtgtgtgtgtgtgtgtgtgtgtgttttaaccaatctaatggatgttcttttggtattttggtcagagaggagtgataattaaaggtttagaagaaattacagtacacaacaaggatgaagtctatcaaattttagaaaagggggcagcaaaaaggacaactgcagctactctgatgaatgcatactctaggtaagaaagccatagtctcttccctagccccattttcttttaagaagaattaggaacttggagaaagtcaaattggggtgggtcagggtatgtgggtcacgtacctagagtttgtgttataaggaggggtcattggtaattggcttgagatttatatggaaggaaccaatattggaagaatgttgaaaggagaacaaagataagttgaaccatagctgaagtattaaacttttttttcttttttgagacgaattttcgctcttgttacccaggctggagtgcagtggcgcgatcttgactcactgcaacctctgcccaccgggttgaagcaattctcctgcctcagcctcttgagtagctgggattacaggtgtctgccactacgcccagctaatttttgtatttttggtagagatgtggtttcaccatgttggccaggctggtctcgaactcctgacctcaggtgaaccacctgccttggcctcccaaagtgctgagattacacgtgtgagccacggcgcccggcctaaacttttttaaagtagaagaatccttttattctagtaacatgatatatggaagcccaggataaaatgtggctgctatagttgattttggaatgggacgctctgaggcttacctccttagccttatgaaggggtccctgaggcacttttgtggagccccctactgatattagaatatagtttgaaaacccttgcattgaataaggattagaagttaggtcttttaaaatggctttattttagtgtgggagacagatggtcactaacactggctttcatggggtgaaagggatgatttttttcgctctaaatatcttttaccgaaatataaaattcctttttaaaaaattgtttattttcctctcttaccactctattcattgagatataaaatccctgtcataaatttacgtaagttagaaactccttttttcttgtaaagacccgtacaggacaaattccaaattctacagatatagtttactaaaacagaagtggtttttttgtgtgtgtgtgtggtctttaaacctcagaatgtaatagaaaaagcaatggattgcaattagatatttgcgtgtagtctcagtttcgcggttaattcagtatgtgactttttgtaaataagtgaatttatctgcttatcagtttctctgagctacaaaattattgttaggattagaagtcttatttcttttctggcttgtagttgaaaatttctataaaatgccataacaattacagttgcaactctaaaaaagtttgcatttaaagaaagaagaaaaatataacataaaagtgattaagatcatggaattttggatgatttcaaaattttaattaaattttcacttaatggctttccaataaaatggaaattttattctgtggttgattataacttaatttcatgtagaattttgagaactgaactaaagactaggtaaaatttctttaggtacatttcactaaagtataaaatttctatttttccttttttcttgtatgtagacttgtataaaggtcactttttatgaaggtatgtgacaaagaggagaagctaattaattcagttttcccaaattagagctaacttcaatgcttatttgtattaattgcctaatctggattaggaatgggtagataatggtagaaaaacatgagatgaatagtattattattattattattatttttgagacagagcctctctctgtcccccaggctggagtgaagtgatgcgatctcggctcactgcaagctctgcctcccgggttcacgccattctcctgcctcagcctcctgagtagctgggactacaggtgcccaccaccacgcctggctaattttttgtatttttagtagagacggggtttcactgtgttagccaggttggtctcgatctcctgacctcgtgatccgtccacctcggcttcccaaagtgattacaggcgtgaggcaccatgcccggtggagatgaatattataattcagatctatagtttacatttatgtttttccttaggtcttcctccttttctgtaattttaaataatttaaataattttataaaaatgatacttggctgggcgcgatggctgacgcttgtaatcccagcactttcggaggccaaggtgggtggatcacttgaggtccggagttcaagaccagcctggccaacgtggtaaaccccgtctctactaaaaatacaaaaattagcttggtgtggtggcgtgtgcctgtaatcccagatactcggtaggctgaggcaggagaactgcttgaacccaggaggcagaagtttcagtgagctgagatcatgccattgcactctagcctgggcaataagtctcaaataaataaataattaaaaaagatacttaattttttttttaagtaacatgaaagtacaaagaagaaaattgaaacttaccagattctctgtcaattgtcagtgatattaacaaacataataatgttcaccaaatgccattggatacagaaagaatgtctttggtcatctgtataattttttttccccctaagataaaaagcacagtatttgttttgttttttgtttttttgtttgcttgtttgtttttttgtgatttttttttttgagacagcgtctcactttgtcacccaggctggagtgcagtaactcaatcatggcttactgcagccttgacctcctgggctaaagtgatcctcccacctgagcctccagggtagctggaactgtaggagcgtgccaccacgcccagctaatttttaaatttttttgtagagatgatggtcccactatgttgcccaggctggtttcgaactcctgagttaaagtgaccctcctaccttggcctcccaaagtgttgggattacaggcatgagctaccacccctggcctgaatatcagtatttagcataaggtagacttttgaacattttataatctagcagtgattatcttgtagtgttttagtaatcatgctgtttactatttctgctgttaggggataggagtcatctatttctgatgacagtctcaaagcagagaagtgtacttgtgcatgtacacaacagctgacatggatgggaaggtggaagagtaaactaatgccttacctggtaccatttgaatttatggtaatgacatatttcaaatggttcttatgaatagaagatgattacaagccatctcttcttgacataccaggcaactgtttcgaccccacccacatccagctttcagaggtgcctcaggattctaagtcttttagagagcttcttattgatgcctcttttgcaggcagtagatatgagaaaacaaaatcctaatcactgttctatctatctcctatcttccaaaatattcttgatatctcctgtctgatgttatctttctctactcatgtggatttagatcttctttcctgttttcagtatttcagaagcagcaaatgctattttacattataatgactgggcaacttgatattgttttctagtcgttcccactcagttttctctgttacaatacatatgaaagaaactacgattgatggagaagagcttgttaaaatcggaaagttgaacttggtaagcatccaccttaatactactgtttcactcttaaacaccttatagagcagcntgaaattttgtccttgagacaaaatttttgtggtcactgggtgattagctttgtagtgggagaagaaatttgttaattacagaaaaaattattttgctggcgatttaatacattatgtatcctgtgagaatgaaagtctttgaatccaaatccaatagactcactttttatttttatttttaaaattaaaggttgatcttgcaggaagtgaaaacattggccgttctggagctgttgataagagagctcgggaagctggaaatataaatcaatccctgttgactttgggaagggtcattactgcccttgtagaaagaacacctcatgttccttatcgagaatctaaactaactagaatcctccaggattctcttggagggcgtacaagaacatctataattgcaacaatttctcctgcatctctcaatcttgaggtaagccctttgaaaggaagctgcaagtgtagtagctgtaattcttatttggctattatatattttaaaagttcatttactaggatggacacagtgactcacacctgtaaacccagcactttggaagtccaaggtgggcggatcacttgagcttaggagtgcctgggcaacatgccgaaaccctgtctctaccaaaaatacaaaaaattagctgggtttggtggtgtacaactgtggtcccagctacttggggggctgaggtgggaggatcacttaagcctgggaggcagaagttgcattaagctgagatcatgcaactacactccagcctgggtggcagagggagaccccatctcaaaaaaaaaaaagtatgtgtataaaaaaaaagaaaagtatgtgtatacacacacacacacacacacacacacacacacacacacacacacatatagtagggaaaaaaagttcatttagtagcttcatttttttttttttgagacaaatcccactcttgtcccccagactggagtgcgatgacgcgatctcggctcactgcaacctccacctcccaggttcaagcgattctcctgcctcagcctcccaagtagctgggattacaggcacctgccaccacgcccacctaatttttgtatttttagtagagacgtggtttcaccttgttggccaggctggtctcaaacccctgacctcaggtgagccgcccgcctttgtctcccaaagttctaggattacacgcgtgtgccactactcagcctagcttcgttcattctatgctataatgtaaaagaatctggacattgcatatgaatatatacaggaggacactcctgaagaagttatctttttccttcctggcagagtttttaaccttaaaaagccagtttcttaatggctttttccacacagtcttcaaagaaaattgctgtggtcattagcagtgggtggtgtatggagatttaattgaggacttagaagcaggccaagtgaatgctcgctagtgtggtagaggctgcttagagaacactgaagatggcgttggatgtgtgagaacagagaggaaaaccaagaaaagtaacaaagatggtaaaatgtacgcttattttattgctatcatctgccttaagtggaaattttatttatttattaatttttttacttttagaggtagagtctcatactgttgccaaggccgcagtacagtagcatgatcatggctcactgcaacttaaattcctggactcaagtgattcccccaaccacagcctcctcctgagtagctagtactacaagtgtgagccaccaggcctggctaagttttgttttgttttgttttaaatagagacagaggtctcactatgttgcccaggctggtcttgaactcctgggctcaagggatcctcctacctcagcctcccaaaatgctgcgattataggcatgagccacctcacttgacctaaatggattttaaaaagcttttttaggccaggcacggtggcttacgcctgtaatcccagcactttgggaggctgaggtgagtggatcatctgagctcaggagttcaagaccagcctgggctacatggtgagaccctctgtctctnnnnnnnnnnnnnnnnnnnnnnnnnnnnnnnnnnnnnnnnnnnnnnnnnnnnnnnnnnnnnnnnnnnnnnnnnnnnnnnnnnnnnnnnnnnnnnnnnnnngcatggaaagtttttccatttgttagtgtcaactctgatttctttcagcagtgttttataattcttaccgtagagatccttcacctctctggttagttgtattcctaggtattttactgtttttgtggctattgtgaatggaattgcattcttgtttggcactcagcttggacattattggtatataggaatgctactgattttagtacaatgattgtgtatccagaaactctgcttaaattgttgatcagatctaggagcttatggacagagactatggggttttctaagtataaaatcatatacacccagcggggctcggtagatcacacctgtaatcccagcagtttggaagatgtaggtgggcaggtcccttnagagcctgagcaacatggtgaaaccccatctctactaaaaaatacaaaaaattagctgggcatggtggtgcgcgcctgtaatcccaactactcaggaggctgaggcgggagagttgcttgaacccaggaggtggagattgtagtgagccgagattgcgccattgcactcaagcctgggtgacagagtgagactctgtctcaaaaaaacaaaaaagcttttttaaggtgtccaactgccccttcattaaaaaaaaatctttgttgagatttaattcacataccataaaattcactgatttaaagtatattaatttaataattctagtatatttacagagttgtccaaccatcaccaaaatctaagttttgaacattttcataacctcagaaagaaagcctgtacccattgaaattacttttccatttgccccactcccatcgctactgctttttgcatctatatatttgcctattctgggtatttcatataaatggaattacgtaataggtagttttttgtgactggcttctttcacttagcataatgttttcaaggttcatctgtgttgtaccagcaatactttattcctttttacaggtgaatattattctatagtatggatatgggatttttttgtttttttttttttttgagatggagtctcgctctgttgcctaggctggagtgcaatggtgtggttttgactcactgcagtcttcgccacccgggttcaagtgattctcctgcctcagcctcctgagtagctgggattacaggcgccaccaccatgcctggctaatttttgtatttgtggtggagacagggtttcaccatgttggccaggctggtctcgaactcttgacctcatgattcacccgccccggccttccaaagtgctgggattacaggtgtgagccactgtgcccggctgatataggacattttgtttattcatcagttggtagattgattgagctttgtggtttttttgttttgttttgtttttttgttttttttttttgagacaaggtccctctctgttggctggagtgcagtggcacattcactgtaacctcaacctcctggccttaagtgatcctcccaccttagactcccaagtaggtgggactataggcacatactactatgcccagctaatatttatttatttattgtagaaacaggatctccctatgttgccaaggctggtctcgaattcctgggctcaagtgaccctcatgccttggcctccaaagtgctggaattacaaatgtgagccatcattgagtttaagaatagtctaaaggaaattatcctaagggtcgagactctgaaaattgaagagaagggaaaaaaggattgaacaacttcctttttaaaggttgggcatagtggtcttaatgactagattttaaaattagatataactataaaatattacttgtaagttattatataacatattttagataacagaactacattattctcacaatatcttcagtaattgacctttcctttccatgacaggaaactctgagtacattggaatatgctcatagagcaaagaacatattgaataagcctgaagtgaatcagaaactcaccaaaaaagctcttattaaggtaactgtgaatttttgtagagtaatgtaatcttgtttgacaaatgtgaaaataagaaactgaagtgggagataatagttaaacaagatttgttaaattgcccatggaaggctttttatatagtgatttaaactaaatgtcttacatgttaacatatttttttctaatgctagtatgttgactttaccaactttatcaactgagttggtactcttagcaaaattttcatttatttacatttacaaaatttatttatttgcatttttgaggtataatttacatgccataacatccacctaatgtaagcatacaattcaatgatttatagtgcatttacagagttgtggagtataaccacgatctagttttagaaaatttgttatcactatccagtttccctttgctcctttacaatcatgtggccactgacctgctttctgtctacagatttgccttttctggacgtttcctataaatggaatcatgtaatatttggtcttttgcatctagtttcttttgcctagcataaccatttggggttccacttataacatgtatcagtagtttatttctttttattgctgaatagtattcaattatatgctgataatatgacatttggatcatttccactaatgccattgtgaacatttctgtacatgtctttgtgttgatgtgttttcatttcttttgggtagatatctagggatttaatttctgggttgtatagtaagtttatgctctaagaaactatnccatgtagctgtaccactttgtatttcctacagcagtttatgaggtctgcaatttctccacctcctctttaacacttgttatggtcggtctttttaattttaaccattctaaggagtataaaatggtacttcagtacggtttttttgtttttgtttttgtttttttttttgagatgaagtctcgctctttcacccaggctggagtgcagcggcacgatcttgactcagtgcaacctccgcctcccaggatcaagtgattcttcgacctcagtctcccgagtagctgggactacaggtgtgcaccaccacgtctagctaatttttgtacttttagtagagatggggtttcaccatgttggccaggctggtcttgaactcctgacctcgtaatctgcccgcctcagcctcccaaaatgctgggatcacaggcgtgagccaatacgcctggccccaatatggttttaattagcatttccctaatgactaatgatgttgaacatcttttcttgtgcttattatctatttgtttatcttttttggtgaaatgtctattcaaatgctttgcccaattttaattggtttgtcttattaagttgtaaggagttcatgtagtctagatacaagcccttaatgagatatgatttgcaaatatttcctcccagtctggctttactttttcctttccttgatgttttttttttttttaaataaagtttttagtattgagatgattatagattcacatgcagttataagaaataatacagagaaaacaggccaggcacggtggctcatgcctgtaatcccagcactttgggaggcccaggtaggcgaattgctttagatcaggagttcgagaccagcctggctaacatagtgaaaccctcatctctactaaaaatacaaaaattagctgagcgtagtggcacgtgcctgtaatcccagttactcaggaggctgagacaggagaattgcttgaactcgggagacaggttgcagtgagctgagatcgagccactgtactacagcctgggagacagagtgaggctctgtctcaaaaaaaaaaaaaagaaaaaaagtaataatacagagaaatcctttgtacattttgttgaactatagaatattaccacggggatattgatattaataacaatccactaatctttcccaattttccttacatgtgtatgtgtatttaattctagacagttttgtcacatgtataggttcatgtatttaccaccacaatcaagatactgaacagttccatcaccacgaggacccttcatattgctcttttgtaaccacttttcttcccaccatatccttcctttcctggtacccagtaacctgtcctctatcatttcaagactgttattgattggaatcatacattatgtaaacgtttgagattgccttatttatttatttatttatttattttgagatggagtctcactctgttgcccaggctggagtgcagtggtgcgatctcagctcacagcaacctccgcctcccgggttcaagcgattctccttcctcactctcccaagtagctgggattacaggtgtttgccaccatgtccagataattttttgtatttttagtagagacggggtttcaccatgttcgccaggctgggtctcaaactcttgaccttgtgatccacccaccttggcctcccaaagtgctgggattacaggcttgagccactgcacccagcagatctttcttttttagtactaagtagtagtccatggtgagtatgtaccatacatacagtttttgtaaccattcacttattgaataacatatgagctaatttcagtttttctgctattacaaacaaaactgctattgacattcatttataggtatttatgtaaacataaatttttatttctctgggataattgcccaagagtgcaattgctgggttgtataataattgaatgtttattattttagggaactgcctgtttttcaaattggctgtatcattttacagtgtatgagtgatctgatttcttcacatcctcaccagcatttggtggtgtaacttttttattttagtcattctgataggtgtggtaggtgatagatatctcattgtggtttttaacttgaatttttctaaaggctaatgatgttgagtgtctttttaatgtgcttatttgatgtttatatatttatgtatatatagcatatacatatattgcatatttatatataacatatacatgtatatatatatttatttcccattataatttatttggggaaatatctgtatatttgtcctgtagagttttaccatagtatcttttgacgtgttcctctgttctttgtattttctttgtaaatcggtagctgaatcttgaggcttgattaaattcaagttttgtcttatttatttttggcaaaactaattcataagcagtagtgtcttcttccatttagaagtatgtaatgtctggttctttgtcttttttttttttttttttttgagacggagtctcgctctgttgcccaggctagagtgcagtggtgccatctcggctcactgcaagcttcacctcctgggttcacaccattctcctgccttagcctcctgagtagctgggactacaggcgcctgtcaccacgcccggctaattttttgtatttttagtagagacagggtttcaccatgttagccaggatagtcttgatctcctgaccttgtgatccgcccgcctcggcctcccaaagtgctgggattacaggcgtgagccaccgcgtccggccagaggtatagttcttataggaaaggcaggacacatgcttgattaatttcctttatttgccaattttgagaataatgagttggtttcctaggtttcttagtgtcattataaactcctagatttaaactatttgtgttaacccattgtagttgttctcctcaccgatgctcagattggctcatcttaggccaggggtatgttagtctgttttcatgctgctgataaagacatacccgagactgggcaatttacaaaagaaagaggtttattggacttatagttccacatgtctggggaggcctcataatcatggcggaaggcaaggacgagcaagtcacatcttacgtgggtggcagcaggcaaagagagagagcttgtgtggagaaactcctgtttgtaaaaccatcagatctcgtgagacccattccctgtaatgagaacagcatggaaaagatccgcccctacgattcagtcatctcccaccaggtccctcccgcaacgcgtgggaattatgggagctacaagatgagatttaggtggggacacagagccaaaccatattaaggggttacatcttcaagtggcttactgagtccttttgattaacctagtaggctttgcttagcttatttccttgtcttatttgacaagatgttccgtattcatcttgaatattttctgcctcagtcctggaatcagatgcttttataaggaatcctggttcattttagtgtgaattactcctaccaacctgggtactggaggttgtggtttttcttgggaagtccatatttctagaatgagtgtatttaaaaaggagctttgaaagactttatttctaaacaaattaatattgattaaaaagtatggttataactttttatcatacttctttaagttttaaaagacataaaaaggctaactttacattttatttgttgcatgtccttcccaaactgaatgaaaaaagtactaaactgacacctacaacattcctcttgtgtaggagtatacggaggagatagaacgtttaaaacgagatcttgctgcagcccgtgagaaaaatggagtgtatatttctgaagaaaattttaggtaagcccttggctatggagttaatttccaagaataagcatttctgataacaggctatttgaagtaaaacttatgtagcagtaagtaaaatctttatatccagtgccgataaatacttcattttgtgtgtgtgtgtgttttcttttgagacaaggtctcgcactgtcacccagactggagcacagtggcacaatcttggctcactacgtcctcagtctcctgggctcaagcgatcctcctgcctcagcctcccaagtagctgggattataggcatgagccaccacaccctgctaatttttgcatttttttgtagagacagggtttcaccatgctgcctaggcttctattttgttttgacattaacaagtagctatcaaacactttttaaaaatcttttactaacttttaatttttaaatcattaattcatgtgaagtttcaagaagagtacaagagaggtttcatgtattcttcacccagtcttcctcagtggttatctcttaaataattatagtacaaggctggatgtggtggctcacacctgtgaatcccagcactttgggaggccaaggcaggcagatcacgtgaggttgggagtttgagattagtctgaccaacatggagaaaccccatcactactaaaaacacaaaattaccctgtgtggtggtacatgcccgtaatcatagctactccagaggctgaggcaggagaattgcttgaagctgggaggcggaggttgtggtgagccaagatcgcgccattgcactccagcctgggcaacaagagtgaaactctgtctcaaaaataagtaaataaaataatagataaataaaaaataggcgcgataaataaaaaataggctgggcgccgtggctcacgcctgtaatcccagcactttgggaggctgaggcaggcagatcacctgaggtcaggagttcgagaccagcctggccaacatggtgaaaccccgtctctactaaaaatactaaaattagccaggcatggtggcaggtgcttgtaatcccagctactcgggaggctgaggcaggagaatcacttgaacctgggaggcagaggttgcagtgagctgagatagcagcattgcactccagcctggggaacaagagcgagacttcatctcaaaaaagaaaaaggaaaaaataataataaaataaataaaaaataattatagtacaatatcaaagctgggaagttgaccttgatacaatatgtgtattagtttgttcttatactactatagagaaccacctgagactgggtaatttataaagaaaagaggtttaattggctcacagttccataggctgtacaggaggcatggctggggaggcttcaggaaacttacaatcctggtagaagagctaaggagaagcaagcacatattcacatggcggcaggagagagaaagtgaagaggaaagcactgcacacttttaaacaaccagatcttgtgagaactcattcactatcatgagaacagcaagggggaagtccatctttatcactcggttatctcccatcaggtccctcctccaacatgtggggattataattcaacatgagatttcagtggggacagagaaccagaccatatcaagatgtgtatatagtagttctatgccattttgtcacttgtatagatttgtgtaaccaccactgcaatcaagatacagaactatcctatcatcacaaggatctttcttgctaattcactgtagtcacactcacctcatcttttccatgattcctaacccctggcaaccactaatctgttcactttttaaagccctggagtaatttgttcaaaggaaagcttttattgaggcccattgtataaaacaacaataataacagagaaaacaaggggaagaaggcaagtgggatgctaaggactataacttgaaaattcctgattgtgtttatccttgaagatattaggaagcaagactttcacagagcattttttaaaagttaatagtgataaaagatattagacctaataataaccagaagcattttagtataatcttttactgaacttttttgtagatgttaacactctaatagtatataaatcatttaataaacttagttttttctgtgttacttccaactgtcataatgtattccatgaatgtgtaagatgccctagaatcagaacaatgtaagattgtgggttagtgaacagtttaccatcactaatggaggtgttctttttttgatgctttagaagtaaaaaataattggtgaggcactcaatcctggcctgtagtctttagaaatgatattgattattggaggctttcatctttctgattttatttttgaacttaagaagtaactttggttttcatttgtttagtcccatgattgaaaatatggtgtttgctctctttttttttaacttttattttagtttcaggagtacatgtgcagatttgttctatagatatattgcatgtaacaggagttggtgtacatattattttgtcacccagataataaccatagaacccgatggatagcttttcaatccttgctctcctcttaccctccaccctcaaagaggcccaggtgactattgttcccttcctcatgtccatgtctgctcagggtttagctcctacttataagtgagaacgtttggtgtttggttttctgttcctatgttagtttgtttaggacaatggcatccagctccatccatgttgctgcaaagaacatgatctcattctttttttttttttttttttttcgagacagtcttgctctgtcacccaggctggagtatagtggtgtgatctcggctcactgcaacctctgcctcccaggttcaagtgattctcctaccccagctgcccgagtagctgggattacaagcacctgccaccatgcccagcaaatttttttttttttaagtagagatggggtttcaccatgcaccatgttggccaggctggtcttgaattcctggcctcaagtgatcaactcaccttggtatcctggcgtactgggattacaggcatgtgccactgcacccagccatcttgctcttttttatgcctgtgtagtattccatggtgtatatgtaccacattttctttatccagtctgctgtggatggatagctaggttgattccacgtctttgctgctgtgaatagtgctatgatgaacatatgtgtgcatgtgtctttatggtagaacaatttatattcctttgggtatatacccagtaatgggattgctggctcaaatagtatttctgtgtgtgtgtggtttttttttttttttgagatggagtcttgctctgttgtccagggtggactgcagtggcacaatctcggctcactgcaaactctgccccccaggttcaagcaagtctcctacctccgcctcccaagtatctgggattataggcacccaccaccgcacctggctaatttttgtatttttagtagagatggggtttcaccatgttggccaggctggtctcgaactcctgacctcaagtgatctgcccacctcggcctcccaaagtgctggattacaggtgtgagccaccatgccctgccggtatttctgttttaagttctttgagaagtcgccaaactactttccataatggctgaactaattttcattagtagcatataagcgttcccttttctccacaactttatcaccatgtgttattttttgactttttaataatagccattctgactggtgagatggtttctcattgtggttttgatttgcatttctctaacaattaatggtgttaaacatagtttcatatgcttcttagccacatatatgtcttcttttgaaaaatgtccacatcatttgcccacttttttttttttttttgagacacagtttcactgttgcccaggctggagtgcagtgtggcacgatctcagctcacttcaacctccacctcctgggttcaagcgattctcctgcctcagcctccgaagtagctgggattacaggtgcctgccaccatgcccggctaatttttgtatttttagtagagatgggatttcaccatgttggccaggctggtcttgaattcctgacctcaagtgatctgcccacctccgcctcccaaactgctgggattacaggtgttagctaccgtgccccgctgggtgtatatgattttatacttagaaaaccccatagtctctgtccataagctcctagatctgatcaacaatttaagcagagtttctggatacacaatcattgtactaaaatcagtagcattcctatataccaataatgtccaagctgagtgccaaacaagaatgcaattccattcacaatagccacaaaaacagtaaaatacctaggaatacaactaaccagagaggtgaaggatctctacggtaagaattataaaacactgctgaaagaaatcagagttgacactaacaaatggaaaaactttccatgctcatggataagaagaatcaatattgttaaaatggccataccacccaaagctatttacagattaaatgctgttcctctcaaactaccaatgacattcttcacagaaaaaactattgtaaaattcatgtggaactggaaaagagcccaaatagccaaagcagtcctaagcaaaaagaacaaagctggaggcatcgcattacctgacttcaaactatactacagggctacagtaaccaaaacatcatggtactggtacaaaaacagacacagaccaatggaaccgaatagagagcccagaaataaagccacacacctacagccatttgatcttcgacagaacatgcaatggggataaaactgcctgttcaataaatggtgctgggataactgcctatccatgtgcagaatattgaaactggaccccttccttaacgcccatatacagaaatcaactcaagatggattaaaaacttaaatgtaaaacctaaaactaaaaacccttgtaaaaaacctaggtgtttgttctctaatacacatgaggcataatctgagatagttttgtctgaaaacgcttttggaattagtacagtgtcagtcagagaagaatcacaaaaactacagccaacatttaaaacaggataatgctttatttaagccaagcttaatagacattttaaaaccatatcaaaatcatctcatccatacagtaacaatgttgtattaccccttggcattcactataaaaaagcatttcaaataatcccgttttacataaaagatctatttctatttattttattttatttttatttttatttttgagacagagtctcactctgtcacccaggctggagtgcagtggcgccatcttggctcactgcaagctccgcctcctgggttcacgccattctctcgcctcagcctcctgagtagctgggactacaggtgcccgccaccacgccctgctaattttgtttttgtattttagtagagacagggtttcaccatgttagccaggatggtcttgatctgctgacttcgtgatcttcccgcctcggcctcccaaagtgctaggattacaggcgtgagccaccgcgcctggctgtagaagatccatttttaataaaaagctaatatatttcatcaaaagactattagaattaactcttctcttacagctcttttctagcttttcctttagtcaacaatatctctagctaatacgttaagggaatttgtattcacggaagaatctttgtcatttaagcataatgtgaaatagaaaattgttggttgttatcaaagaattagatgagcaaatacaggcattcatttctgaaactgactaatactcaagaaatcagagacccattaaagtgggtttggaagacctgtgagctttgcgcttgagaaaagcattctctattttactttttatgacttcttttgactttgacttcatcttctgatatttttgttgaatttagaaatttttagtttctaaaaactcttttctgccatccctgtctctccttttgaaaaatatagcatccttttattttatagatctattccttatctcagaaacattattaatgttattaaagttttcttttatgnttttctttcctttgggatcttttttttccctgttgtgatatctgtcatttgtatttattttcttcaaatgtctagtgatttttggctggcaattaagatggattagaagctttgtacatgggtgaggattatggacctgtaagttcactatagatgaaaaagtggtgatctcagtcttaagtctgggcttccatcagatatcattctttgttggattttttttcttttgttctagccctcagtcttttctgagaagatttgcccagtttgcttggagatttttctagctgctgctattttttgattagagtgggtatagggggctgaggattccatcattttgtatgtagatttacacttaaatgctcatttctagtccctaaaccttctacagtccatgatgtctagtgaaagtgaacctggaaattctgctgcaattcctatagactagtggctgtcaatggaagtggtgttgggggactggtggtggtgggtggttttgtcccccagaggacatttggcagagtccagtgacattttttatcatcatgacttggatggtactgaacatcctaaaatgtacaggacatccccacaatgaagaattatttgatccactagtgctgaggctgagaaactctgctctagagagtaatcctttgttctcatgagggttatgcggtggggtgagagtggtgtttgtgcgtgttgcagcagcagggggtgtaattgctctgtatacatactttaagtctcagtttttaacccctaatcttaccccttccttctaagatacctgatgccttcaagtcccacatttttccagcattctgtggggcatatttatattctgtatccctgattatagacacttaggttgcattccctcctctctctactttgagttatagtccgtcctctgttagctttctagcttctcaaatctggaacacacatgcttttcccctcataggtagggattcttagtttcagaattgagggcaagggaaaaatatttnntttataaaacaaagacaaggaatataatttgttctttgtaatttgtatttattgcttattgacacaggtatcaagtgacacttgggtatcaagtgatggtgataaatgttggaaatgagtttgtgtagctgtcacaattgtgttagaatacattttataggagttagaaaaaaatattaactgttaaactcatattaaactttattttagagtcatgagtggaaaattaactgttcaagaagagcagattgtagaattgattgaaaaaattggtgctgttgaggaggagctgaatagggtaagcacttaaaatgatatttactgttatgtgaaaagcaaatattgaaagaaaattttagaatgaaagatctaatattttttccttcaagattttttttttttagacggagtctcgctctgtcacccaggctggagtgcaatagcgtgatctcggctcactgtaacctctgcctcccagggtcaagcgattctcctgcctcagcctcccgagtagctgggattacaggtgtgcaccaccatgcctggctaattttttttgtatttttagtagagacagggtttcaccatgctggccaggctggtcttgaactcctgacctcatgatctgcccatctcagcctcccaaaatgctgggatgacaggcgtgagccactgcacccagctccttcagatttttttggaaaaaaaaaaaagattttattttgctgacccttatactgaaagtaagttatatcatgattttttactatcattaatcacatcaaaaaagctgacagcttatattaataaaacattacaagaaattaactgaattgtttgattttgttattgaaactacaaaatagtgaatgctgaagcagttttgttaacatgtttatcagatgaaggaatacagatattgggagagactggatgttaaataaaagtaatataactagggtaggcaagaggcctgacctttcagggccaccctcatattaatacctttatttatttatttttaattattttttagagacagggtcttgcttgatgcccaggctacagtgcagtggtgtaatcatatcttactgcagcctcaaacttctggtctcaagcaactctcctgcctcagcctcctgagtagctggacttcaggcatgcactaccatgcccggctaattattttatttttttgtagagatggagtcagtctcgctatgttgcccaggctggtctcaaactatggggctcaagtgatctcctgccttggcctcccagagtgctggggttacaggtgtgaaccaccttgccaggccacattaacactgttatattcaaatccattgacaatgttgaaggaaactgaagaattaatagtactacaccagacctattatttaatctcaaagtgttgagtaagattacagaaagaaacaggatgacatatttgtgttaacctaccgggtaacttcttacaacttttgcatggaaataatttgtttcatttttctaatcttatgaactagctagatatcctaccagccagctcagcgttttttaaattcttatatttaggttacagagttgtttatggataataaaaatgaacttgaccagtgtaaatctgacctgcaaaataaaacacaagaacttgaaaccactcaaaaacatttgcaagaaactaaattacaacttgttaaagaagaatatatcacatcagctttggaaagtactgaggagaaacttcatgatgctgccagcaaggtttgtcccttgtgttgatttgtactcatattaagtagagaatgggtagaaaaaattttctgtgcttaagcattaaatattctgtttattcaccccaaatggtatttctgtccatttaaaaaacattattttactatttcatccatgtttttctcactggagatgtcgacttatgaaaaaactactcctgctcctggagttttgaaaatagaacataacttagctgggagtggtggctcacgcctataatcccagcattttgggaggccaaggtgggtggatgacctgaggtcaggtgttcgagaccagcctgaccaacatggagaaacctgtctctactaaaaatacaaaattagccgggcgtggtggcgcatgcctgtaatcccagctactcgggaaggctgaggtggaagaatcacttgaacccgggaggcagaggttgcggtgagccgaaatcacaccattgcactccagcctgggcaacaagagcgaaactccgtctcaaaaaaaaaaaaaaaaaagaaaatagaacataactttataatatattttgtagacatttagaatagtgatgctgtgatgctttttctttgtggggatgattgaacctaattagtcattaagaatttagtatgttctgtccaggcatggtggctcacgcctgtaatcccagcactttgggaggcccgaggtgggtggattgcttgaggttaggagttctagaccagcctgaccaacatggtaaaaccccatctctactaaaaaaaaaaaaatacaaaaattagccaggcgtggtggcacatgcctataatcccatctactcaggaggctgaggcaagagaatcacttgaacccaggaggcagaggttgcagtgaaccgagatcatgccactgcactccagcctgggtaacagagcaagactctgtttcagaaannnnnnnnnnnnnnnnnnnnnnnnnnnnnnnnnnnnnnnnnnnnnnnnnnnnnnnnnnnnnnnnnnnnnnnnnnnnnnnnnnnnnnnnnnnnnnnnnnnntttcggaaaaaaaaaaaaaaagaatttagtatgttctgatgatgaaagatgttgaaagtatttaattttttttttttttttttgagacggagtctcgctctgtcgcccaggccggactgcggactgcagtggcgcaatctcggctcactgcaagctccgcttcccgggttcacgccattctcctgcctcagcctcccgagtagctgggactacaggcgcccgccaccgcgcccggctaattttttgtatttttagtagagacggggtttcaccttgttagccaggatggtctcgatctcctgacctcatgatccacccacctcggcctcccaaagtgctgggattacaggcgtgagccaccgcgcccggcctttaattttttattagttgtactttttttttttgagacagactcttgctttgtagcccaggctggagtgcagtggcatcatctcagttcactgtaacctttgcctcccgggttcaagcgattctcccgcctcagcctcccaagtagctgggattacaagcgcctgccaccacacccagctaattttgtatttttagtagagactgggtttcaccatgttggccaggctggtctcaaactcctgacctcaggtgatccacctgcctaggcctcccagagcgttgggattacaggtgtaagccaccacgtccggccattaggtgtacttctgaggaaatagtagaacatagaaggaaaaaaatttctgaggaagcataattattgcaataactgaaaaaatcagttttccttgcttgtgtagatggctacaggaagggaaataaacattactgggcatctggataaattagcatgagttaaagcatttcttctgatacaatgtctaaaattgactttttttttttgagacagagtctctctctgtcaccccggctggagtggcagtggcacaatctctggctcactgcaacctccacctcccaggttcaagcaattctcctgcctcagcctcttgagtagctggaactacaagtatgtaccaccacacccagctaatttttgtatttttagtagagacggggtttcaccatgttggccaggctggaaaatttactagttcttatcaagataaatccttgtgtagatactttcatcagattcctttcaccgtatccattttgtctaacacttatttttaaaaatatagctgcttaacacagttgaagaaactacaaaagatgtatctggtctccattccaaactggatcgtaagaaggcagttgaccaacacaatgcagaagctcaggatatttttggcaaaaacctgaatagtctgtttaataatatggaagaattaattaaggatggcagctcaaagcaaaaggccatgctagaagtacataagaccttatttggtaagttcaggctgttctgttctagtcttgatgtgttaagtgtaatgttgatttcaaaactgataattttgtgaaacatagatgacggtgtcaccaatactctctaccatgcacaaactatttgttcagggtgaagattaatgcttttattgtctttgaattaaaacaaatcttttttccctccccaccctcccttctgttttctataaaatgttacatttattaagtaactaagtatataaacgttagaagtagaagtcctctttttccctgactccggctcctgaccctgggtcattgaccataggtgttattgttaaatttcttgggcctttttctggaaattttttgtgcataaacattctgcaactttttttggggggggcatatatatcttgatggtttgctatattgtcagaatatgtttgtgtctcattgtttttaactattatctccctttagaaaaaagtatgtttatttagtgtgaaatactatcctcattatggaaaatttggacattcagaaatataaaaatttaaaaaatcatctagactctagtctcactaagccaagcactatactttttggtattgatttccagttttttttttcttctgtaaacttaccataattctgtatattatttttagttagagattaattgtagaatattctaattctttgtgtactatgaattatagttatgggtctgatacacttacaaatatgttaagggcttacagagcactatagaaaattgtaatgtatatttaaatatttccttgctttgtagtgagccagttcttttaagctcgttattacaaattctacaacaagggtatacttttgtcaacttctttgaaatggtttgaacggtatttaatatatttatgtcaaagtttacatctttctgtttttgtttgttataggtaatctgctgtcttccagtgtctctgcattagataccattactacagtagcacttggatctctcacatctattccagaaaatgtgtctactcatgtttctcagatttttaatatgatactaaaagaacaatcattagcagcagaaagtaaaactgtactacaggaattgattgttagtacatcctttaaaatatttttgaagggttgcatttgataagtatttgataaaatattttgaagggttacattngataagtctttataaacaatgttaactgctattctttcttcctgagctttactagacacagtcatagacacgtcactgtgagagactacatatatatatattttgttttgttttgttttgtttgtttgttttgagatggagtctcgctctgtcgtccaggagtgcagtggcgtgatctcggctcactgcaagctctacctcccgggttcatgccattctcctgccttagcctcccgagtagctgggactacaggcgcccaccaccacacccggctaattttttgtatttttagtagagatggggtttcaccgtgttagccaggatggtcttgatctcctgaccttgtgatccacccgcctcggcctcccaaagtgctgggattacaggcatgagccaccgtgcccagccagcctctccttttctttatttgtatttatttatttttttcagcctctccttttctcggctcactgcaacctctgcctcctgggttcaagcagttctcttgcctcagcctcccgggtagatggaattataggcatgtgccaccacgcctggctaattttcgtatttttttttagtagagatggtgttttaccatgttggtcaggctggtctcaagctcctaacctcaagcaatccacccacctcggcctcccaaagcgctgggattacaggcgtgagccaccgtgcccggccgagagtacgtttatatttttaaagacagatctctccactgtttattctctcccagaaagattattttcaaatgtatggaactaacttttgaaacctttttcactcatgtcttgtaacattaggagtagcagttattagtgaggcttctaatgactaaagggcaagtttagcaccacatgatatcaagggacttgttagttggcccagaaattggcaagtcactctttccccaggggtcctggacccaaccagaaggggatattgggtagctgattttaaaactacagtaatatatgatagtaataatggtgcaagaaaaatatcttagaattctggggacacatatcacttcttagggttagatctgtgtggccccttctgggccataactataaatcttttctccagagttctatggaagtcactcatctaattgcacttaatattacctccttcatacttgatttatatatagtctttattttataattgtatggttggtctaggaagttcttagccatataatttatttgttttctttgtgcagagtctttgcctccctttttcagcttaacaatatttattaaacattttccaagtaaatactacaaatgttagctgaccctctgcctcaattcagtgcttagatgacattatttgataggttttctcaatcacccaaatttgacaaaattaaaagatatcctgtcagtactaacttttcaaatattgattcattcattaaatggtggtctgtatatatataggcatacttcagagatattgcaggtttgcttccagaccactgcaataaagtgaatattacaataaagcaagtcatgaattttttgctttcccggtgcatataaaggttatgttgaccaggcgcagtggctcacacctgtaattccagcacacgcctggtgggacaatcagaacacaacgtttatcagttacatttgctgtcttataggggtacagtttatggtaccccaagacaattacaatagtaacatcaaagatcattgatcacagtgtataatgaaaaagttagaaatactgtagtagttaccaacatgtgatgcagagacagaaagtgagcacatgatatttgaaaaaagtcactgatagacgtgctcaaggtagggttgccacaaaccttcaatttgtaaaaatttggtatctgtgacacatagtaaggtgaagcacaataaaataagctatgcctgaattgatacatttctacttaccaagttacaatttttgcttgaattaaaagaaaagaggcatgttgctctcacaaaattagttgaaattggtatgctagctcttctttccaaaagaatgtcagtagacctataagtatttactaatgtatttctgttatacttcctcagccctatcctaccaaaaggagattagatcaggattttttttctttttataaatatttccaatctatactacattcttaatttccctatttcttgacaagaacaacatctttcacaagttcttctgatacaataggatgtaagtcatctcagatcttcaaagttaagtacttccagcccaagggctaatcttgatgactacttggtctcagcctttttgactggtaacctaaacttgtttgaaatttattttcttaaaatatacctgtaggtttttaaaaatttattttgtttggagtgctgaaatcttattaactgtcattttcctcttttgaattcttctgacttctatttcattaaactattaaatagttctggctgggtgcggtggctcatctcagcactttgggaggccaaggtgggtggatcacttgaggtcaggagttcgagaccagcctggccaacatggtgaaaccctgtctttactgaaatacaaacattagctaggcgtggtagcaggtgcctgtaatcccagctacttgggaggctgaggcaggtgaatcgcttgaacccaggaggcggaggttgcagtgagccaagatcacgccattgcactccagcctgggccacgagagtgaaactatatctcaaaaaaagaaaaaaagaaattctgtgttttcactgggcttgaaaaaagagaaattattatatttattgtaatataataaattattgtattattgtattgatttatctatgtagagtataaaaaatggagaatggggccgggcgcggtggctcacgcctgtaatctcagcactttgggaggccacggggggcggatcacctgaggtcaggagttcnagaccagcctggccaacatggcgaaaccccatctctactaaaaatacaaaaattagctgggtgtggtggctcacacctataatcccagctactccggaggctgaggcaggagaatcacttgaacccaggaggcagaggttgcagtgagccaagatgttgccactgtactccaacctgggtgacagaatgagactccgtctcaaaaaaaaaaaaaaaaaaaaagaatggagaatggaaatgtaaattttaatgtgaatgtttagctaccaaagtatttaagatatcatttagaaaggtttacagaagtggaaatattctttttaaagacctatttgtttatttctgaaaccagaatgtactcaagactgatcttctaagttcactggaaatgattttatccccaactgtggtgtctatactgaaaatcaatagtcaactaaagcatattttcaagacttcattgacagtggccgataaggtaacaaatgctatgttcttaatatctcaaaattgatgtgttgtttaagaaggaaactcatttttgtttcttcaaagatagaagatcaaaaaaaggaactagatggctttctcagtatactgtgtaacaatctacatgaactacaagaaaataccatttgttccttggttgagtcacaaaagcaatgtggaaacctaactgaagacctgaagacaataaagcagacccattcccaggtatgttgtttagcggacttggggagtacagaaagagagttttaggatgatttgatatgacttgataattaatctatgttacacaatctnaatactgtaaaagctgaaacctgaaaataccatagccactgttgcttataacagtaattattgtagaacaattgagaatacttctcttaatatttgaagttttgctacatctagaaccccatgcagaaccacaatatgacaaaacagtccttttctcacatcaagatgaaagatgaatctggaaaaacatacctttagagaagaatggttataacatttaaagtgaaaatgtatctacattaaaacctgctaagttgtttctaggatggcatggatagttgtctttcataaaccaagtcctactttctcttatttctgtctcactgatagacatttaaaacatagtaaatcgatacaacttttaattcttattgattataaatgtaattcatgatttatcttccctgtaaactgttcctcattatatgaggctttaaaccaaaaccaagccttcaaaccataatctgtaaatatcagatatctgaaaaacagcttctggtattcttaagactttaataatgactgtctaaagttttattaaatgagcttattataatatgacagaactcttataatagttaacatttattgagcaattcactgtgtttattcctcccatcaatatagatataaattctattactagtcagatttttaatgaggaaactgagaccctgtgagcatctaatagtatgtagatcatcttgcagaaggtggtagtgatcatactacctgaaaagcatccatgtttgagtggctcttttgtgtgttttttggcaacttaaaactgcagcattttctcatacatctacatagggtatttcccttaaacccgttgagaactttttaggtgtatattctaaggctgatcccctttttataaatttgctgttttgaaatgcttaaaattgttagacagctctttaaaaaaacaatacaaaaaaatctgatctgaaaagtatcttagcatgaatggtttggctttcctggctttaaggaagcaagttcagtatgtgagctatttcttaggttttccagaacttgaaatgagcactactaaaataattatgtaaaactttgaacacatttacatatagataaatataatacctgcattagcattcaaattattaatctgataatacctttgagactagtaaaaatactgacagactttattcataatcagaatgttagatatgtattgtcaactgatgtgttattcagagatactggccaaccagcagactgaagagtgaataagaatgttggatgcattttcagctcttctttggtcattaggatggcttcttcattttgcaatgtagcatgttatatgcctataagagcttgttttcaaagatgtaaaatatgagcaaagataagactatttacattttgttaatatgatccaactaggttctgtaacattttttagctccagtaattgataatatttttggattgcttgacccgttagtatatcacattaattttcccttctagcagtgttatcagttaaaaagcaactatatatatctgtcaaagtgggtcttaaacataatgtgatatatgggttgtttgattagttttgaggtacactgaaagtaatttgttacttacagctaaaatagtaaagtttgctaattatttactttttaaaaaatcctggctggatgtgatggctcatgtctgtaatctcagcactttgagaggctgaggcagggtgatcacttgaggctaggagttcaagaccagcctggtcaacatagcgagatcacgtctctacaaaaaaaatttgtttaaattagccaggcatggtggctcatgcctgtgtagtcccaactacttggaggctgaggaaggaggatcccttgagcccaggaggttgaagctgcagtgagccttgattgtgccactgcactacagcttggacaacagagtgagaccctgtctctaaaaaaaaaaacaaatcctacattttaatatcacttccactgctttcctctgtagaagaaaggtaaagttaactttatctcttgtcaagaatttatataattctcacctatggacaatacttcttgttttgttatcagtcataaaaaatgttcaagtgtcataattttaagtctcttcacttcccacacctttcttacaggaactttgcaagttaatgaatctttggacagagagattctgtgctttggaggaaaagtgtgaaaatatacagaaaccacttagtagtgtccaggaaaatatacagcagtaagctatttttaaattctcttaaacttttctgtaagtctgaaattatttaagaagaaaaagctttaaatagtacaaataattcctctgtgtactttcaaatttctcttttgttaatattttattatgtatgtgtgtatgtatatatatacatgcatataaatgtcttttcattgcgtatttgtgctctcttttaagacattgaaaaacctggctgttacccacaatatattttcgaatttcctcaatcttagaaaacacactaagtaatttcacaatttctaacctatattactgatgaaaaatatactaactagagcagggtttggcaaactgtggctagcaggctggatgcctgttattgcaaataatttcattggacactgtttacatgttgtctttggctgcctttgcactgcagtggcaaagttgagtcattgcatccaggtcattgaacaatagcctaaaatatttgctatctggcttttcaagaaaaagtttgctgattcctgtattagggttttgttttttgtttttgtttttgtttttgcgacggagtcttgctctgtcacccaggctggagtgcagtggagtgatctcagctcactgcaagctccgccttccaggctcacgccattctcctgcctcagcctcccgagtagctgggactacagatgcccgccaccatgcttggctaattttttgtatttttagtagagaggggtttcaccatgttagccaggatggtctcgatctcctgacctcgtgatccgcccgcctcggcctcccaaagtgctgggattgcaggcgtgagccaccacgcccggctctgttttgttttttcagacaaaaacaaacagcctgctctgtagcccaggctgaagtacagtggcgcgagtgcagtggtgtgatcttggctcactgcaacctctgcctcctgagttcaagtgattctcctgcctcagcctcccgagtagctgggattacaggcacataccaccatgcctggctaattttttgtatttttagtagagatggggtttcgccacgttggccaggctgatcttgaactcctggtctcaactgatcctcctacctcggcctcccaaagtgctgggattgcaggtgtgagtcactgctcccagcctgtattagagtttaatgttgctttgtagcctcattgcttgccagttccgcatacttaacatacactacagtcagacctatgttttcttttaggaattttataactttatggtttaacatttatattcatgatccatttaaaaatttttataaaacataggagatttgtcaagtttcagttttttgcctattgagtattctatactcatgaggagaaagatactatatttaccctatttttccccatttaattctgaaattaaacttcctaaagtttcaagctttctttggtgggaagtagtctttaagggtgggtctgctggacagaaattgtttttctttgtctaagaatgtcttgatttccccttcattcctgaaaggtattttcactggctgtggaattcagggttgacaattatttttttccagcatttgaaatatttccattttcttctggcctctatgaaatgagaaatccactgccattcaagtaattgttcccttataggcagtctccctatagctgctttcaaaacttttttgtctttagaaacttgattatattttgtctacttatatttcgttgagtttattctatttgggttttgtttagcttcttgaatctgtaggcttatgcctttcaccaaaacttgggaaattttcatctattaattctttgaatatttttcagccctatactctttttcatctgcccctatgactttgatgacacaaatgttagatcttttattttggtccctcaggagatatgtagaatatatttcttatagatacatatattctctttgttgttcacatgggggaaatactattgatctgtcttcatattcactgagtctcttctgtcatctctaacctactgttaaacccattcaatgaggtgttttttcagttattgcttttttatttttagttttataattttcatttgctttttttataccttgtttcttagctaggatttttttcttttccaggagtattttaatttctttttggagcattttttgatggctgctttaaaatccttgccagacaattccaacatctgagttttcttgttgttgccatctattgattgtcttttctcattcaacttgtgatttttgtggttcttgatatatgataagtgatttcctattgtaccttgaagattttgggtattatgttaggagattcaggatcctatttaagtattttttagctggcattcaccctgtttaggcttagcatacagatccaggctcacttttatgggctgtggttccactgacaatttagtttttagagcccttgcagtgttattctgataatgctttgtttgtgtgctacccacatgagaaaaatttgtattctgcttttgttgcatgaagtgttctgtatgtgtcactttgatcaagttgattgatagtgctattcaggtcatccacggccttactgagtttctgcctatttgttctatcagtgacttagagaggagtattgaaatctctaattgtagatttatctattttttttattagttctatcagtttttgcctcgtgtatctgaaactctgttgttgggtgcatatacatttaggattattatatctccttggagaattgacctctttatcattatgtaatatccacttttatttctgataagctcttgttctgaagtctgttttgtctgaaatgaatacaggttttctagctttcctttgattgctatttgtatgatgtatccttctccatctctttacttttggtctaagtctttatatttaaagtgggtttcttatagacagcatgtagttgggtcttgctttttcatcaaatttataatctatgatgttttatttttatttatttatttgagacagagtcttgctctgtggcccaggccggagtacagtggtgcaatcttggctcactgcaacctctgcctcccgggttcaagtgattctcctgcctcagcctcctgagtagctggggctacaggcacacaccaccatgcccagctaatttttaaatttttactagagatggggtttcaccatgttggccaggctggtttcgaactcctgacctcaagtgatttacctgccctggcctcccaaagtgctgggattataggtgtgaggcactgcacccagctgcctttcctcatttaaattgagcactttttatgtttttatctcttccattgacttatttatactttttaaatattccctttttagtagtatgtctaggatttaaagtatacattttaagataatttgaatttgtatacattttaagataatttgaatccattatcaaataatttgctgtttcatgtgtagtgaaaggacattataatagtatattcctgtttcctctttcccgtttgtcattattttcatatgttttacttaggtgtttatatgtgcaataaacacctaatacattgttacttgaattgctttatctattttcttttttaatgtatctactagatttttttttttttttttttgagagggagtcttggtctgtcacccaggctggagtgcagtggtgcaatcttggctcactgcaacctctgcctcccaggttcaagcaattctcctgcctcagcctcccaagtagctgggattacaggcacctaccaccatgcccggctaatttttgtatttttagtagagacgggggtttcaccatattggccaggctagtctcaaactcctgaccttgtgattgcccgcctcagaaatttttaattgcatatgtggcttctattatacttctgttgaacagtgctgttctggaactctagctatcatttatatatccctacctaacttctgtcatttgtttttcaaccctgtttttgatcctgttaagtatagcatgttccattgtgaactcttcctatatgctgaatcaaaaaagtatgtcctactttttattcctagtatctagactgatggatttctaggccattccatagccgtggaggaaatactagagtaggattgaagtaggaagggaagtatgatatactttcttaaggcccatgcaaatcatttttcctgctttcctgacatttattgtctacaccagagtttcccagtatggtctagggactttgtattcatcacccaggaatctaggtgatgtttatgtacacactgcacataactgcgtttggcatttattgtcatggcttatagtacttttaactcaatctcgtcttcccattaagttgtgagattttgttttgttttttttatttgagacagagtcttgctctgtcgcccaggctggagtacaatgacacaatctcagctcactgcaacctctgcctcctagggtcaaccaattctcctgcctcactctctcccaagtagctgagattacaggcacccaccaccacgcccggctaatttattgtatttttaatagagacagggcttcaccatattggccggactggtctctaactcctgacctcaggtgatccacctgcctcggcctcccaaagtgctgggattagaggtgtgagccactatgccttgcccttttttcagtcattgtgactttcacgtgtaggtttggtttttaacatctttgctgactcacttggtttacccacgtggtgtaccatctagtggtaatagagagtcacttcattccacaaggtttaaatcttgtaagataacttggaatgctattatagggcaacttaccgagatggaaattatcaatgaattttaaatgtatgtctaaccaacattaatattatatcaagtttatgttacattgttctatatgtataatttgtcacaccccaatataattttaattattagaaagctttatagctaatttaaacataacatttgtaatgttcatgatttgttttacatactaggcaagggaaactgcttaataacagaataaatgactgattgtccaatttagggactagacaagaggctgtagtagatgccctgaagtaacattgcctagtaagaggaataaaacaagtagacagattttgaaagcatctaactggaggagggttgtgaaaggtttggggtattcttctagcagtcgaacgagcgggtctannnnnnnnnnnnnnnnnnnnnnnnnnnnnnnnnnnnnnnnnnnnnnnnnnnnnnnnnnnnnnnnnnnnnnnnnnnnnnnnnnnnnnnnnnnnnnnnnnnnaccaagtagccagttttcaaagcatcaaactggaggagggtgtgaagggtttcatgaccaaagatgatccttccaaaggtcatttaatggcaatgctgtgaaaagacagtgcccaaggcatccattctcaatgcagaagatttactaagatcacgggccctggagccagactgtccacgttcagatctgccacttaagagctgagtgatcttgggaagttatatatcctttgagtcttaattccccatttcaacagtgtcattctcttttcctataggaaatctaaggatatagtcaacaaaatgacttttcacagtcaaaaattttgtgctgattctgatggcttctcacaggaactcagaaattttaaccaagaaggtacaaaattggttgaagaatctgtgaaacactctgataaactcaatggcaacctggaaaaaatatctcaagagactgaacagagatgtgaatctctgaacacaagaacagtttatttttctgaacagtgggtatcttccttaaatgaaagggaacaggaacttcacaacttattggaggtaataactttgtaagtggaacttactttggggagaataataatcagaaagttaaatattcttggctaagaatagatttcaaaacaaatgatattttaagctataatgacttaaacttttaagtataatatttggtatgcttacagatgatctcgttttgtgctttgttatatgtcttctcaatcttggaattaatttaacatttgtacagtttctttcctgtatttatccttggtttctgacttagtagtttcttcaaagaagggcaccctgtcttttgatatgtaataccttccacttatatatgctttttttttttttttttttgagatggagtctcactctgttgcccaggctggagtgcaatggcacgatctcagctcactgcaacctccgcctcccaagttcaagcgattctcctgcctcagcctctcgagtagttgggattataggcacctgccaccacacccggctaatttttttgtatttttagtagagatggggtttcactatattggccaggctggtgtcaaactcctgacctcatgatccacccgcctcggcctcccaaagtgctgggattacaggcatgagccactgcgcccggcctatctttgctttttacttttctccaagtacattcaaacctattattattttaagtatttaggttattgttctggtaactaaaggatacttgataggtttatggatttgcttgaacttaacgcttgcatgagccctttgtaacttggttttttctttctttgcattaataggattttactaacattctcaggaagtaggtacaaagaattaaaatttttaatctatataagctgttttcactaaaaggaactagagtttgtatacaaatagctaatttcagatttgtgataggaaatgtataatatatgagcctagagatcttgtcataccagagagtaaggaagctgttaaagatttctgaggttgtcaaaaggtcttagtagccaacctccccatcttcaaaggtggcataatttgagcatcaaaaagaataatggccataatggattaaaacatatcaaatatattaaaacttacgaactcataaaaatttcataggtctcctttggatcatgctagggaagcaacacattgtcctgaaaatgggtaaagaagaagaaaaaatttagcatccatctgtctttcctaaaagaaccatatcttggtttagcagggtaatgaagaaaagtgtttcattagactctaagctaataaaatggagaagaaatgatagaattaatatatcaccagtatgcaactcttaataaaataacccctgtggatgttaatgatggcttaaaccatttgatcaaaagctgttggggaactttataattaataggctaaccatacctgaactcactgataaatcttaacatgagagacacagcaaagcattttgtgcttgcagtactacctatgaaatactcttgctaaaaaattaaacctgaattaaatcaagcctttaggtctaaccagtttgtagaaaataaagcatagaaatgcagttgaccaaatccagaatttgagatgttcaatggggtaaagacctcatgtcttcagcaacaagttttttttttcaagggaaaaaatatgagaaacaataacctgtatatcaaaagagacttaagactagaggtccttaagtcttagtttgcctgagacagtccttgttgatattgttgtattagaatgattattaagaatgggccctttcactccaaaaggtgtcccaatttggatgataaattatatagtcaccgacttaagacctatgaaccaaatctagtggtgaattctggttcaaacaaagcaattgtgacacacatttgagacgactggtgaagtttgaacatggactagacatttgataggaaggaatcagtgttaacctttttagatgtgatagtggtcttaaagtgctcttacctcttagagatacatgctgaagtaaatggatgaaatgatacaggatttgtttcaaaataatcctgggtttatggaggagttgagtggccagtcctgttggtaaatgtctgtactccacttgttggtaaatgttgaagctgggtaatgaatacaagggagttaattatactgttctctctacttttgtatgtgtttttaaatcttttattactgaaggccaggtgtggtggctcatgcctgtaatctttggaggtcaaggtgggcagattgcttgagcccaggagtttgagaccagcttgggcaacatggtgaaatgccatctcttcaaaaaatacaaaaattagccaggcatggtggtacatgcctgtagtcccagctacctgggaggctgaggtgggaggatggcttgagcctgggaggtcaaggctgtagtgagcactactcatgccactgcactccagcctgggcaacagagtgagacttgtctccaaaaaaaaaaaaaattatggaaaaggtaagggaaaatatgatgttgaataaaacactggcaactttaattttagtaataaatatttatttgcatcatttacaggttgtaagccaatgttgtgaggcttcaagttcagacatcactgagaaatcagatggangtaaggcagctcatgagaaacagcataacatttttcttgatcagatgactattgatgaagataaattgatagcacaaaatctagaacttaatgaaaccataaaaattggtttgactaagcttaattgctttctggaacaggatctgaaactggatatcccaacaggtactttaaaagaganatagaattgttaaattttttgaagtcgaattcaactctatgtagtgtcagatgttcagaaaaattaggtcctgccattgcctgacagaaatttaacatctcactgtaatcaactcaaaatgggaaaactggaaccttaaaatagttttaatcaagtgtcatgatacaggtggtatcacaattcagtataatttcacatactttcagggagttgactttgttaataggggattttttaaaacaaatacaaacctagcactgtttgtaaaaggacattttaataccacaaatatgggagagatgtaactgactaaatctagtttaatgcaaagtttaccacattgtgcattttgttctgtgtccctctcattttgtcatagactattgccatttaggaatccctgttttaagagatcagggatcaccatggaccattagcatttaggaatcaacattttgagagatcacatatggcaaagatcattataggctgtaatgattcagggaggtcttcatggaagagatgtaacaagctgttttacacagcatgaataattgggttcttcattggattatggtaatggttgcacaccctgtaaactcactaaaatccactgaattgtacacataaaatgagtgttttatggtatgtaaattatatcacaaaaccttttttttttttaatttaaaaagcaattgttaaaaggggatggtgctacaggtatttagctcgnactccaaaaagcagttttatgnctcttaaccnnnnnnnnnnnnnnnnnnnnnnnnnnnnnnnnnnnnnnnnnnnnnnnnnnnnnnnnnnnnnnnnnnnnnnnnnnnnnnnnnnnnnnnnnnnnnnnnnnnntttgtaaatcatgagagcatgagcttattacacacaaatataactgggggcctgatccgatggctcacacctataatcccagcacttcgggaggcaaggcaggaggatcgtttgagcccaggggttcaagaccagcctgggcaacatagtatatgtatataactagttaatatttaaccaccacaccacatttatagtgaaatgattactcctatcaaagtaatcatgttgggaaatctactcattccaataatgctgccatttttttcagaacactataactccttttagagcttataacacatcttttatatatcctcagagatggtaaacttcatgttttagagagtaggatgaatcttgaaaacagtaaagtctgtcatcaaattagaaagtattgttagttgcaaacaatgtctgacaggtagcaagactgatcctcatatatggcaattatatttttatatttttagaagacaagattaattaggaagttttaggtttttttaaaaatatttacatctcatactttaatttttacctcttatctaatgtccgttaaaggtacgacaccacagaggaaaagttatttatacccatcaacactggtaagaactgaaccacgtgaacatctccttgatcagctgaaaaggaaacagcctgagctgttaatgatgctaaactgttcagaaaacaacaaagaagagacaattccggtaaatttaaaggatcatattttataatagaactcttttatgaactcttgatgtggntgacttcatgtgaagaattttactgtttacccctcaatcttaccccgcctctcattaatgataggcctagcccttaggcttgtttcttttaatcttactagtttttaaattatgctagtagataataatagccaatacttaatattgtgcttagtaacattgttatataggaacctctactctctataaaaatatattaggaattattttcattaattggtagactttctaataattttgttgaggtttaacttttatattataccatgggcattgggttatactcaaagctagtgttactctagagatgacttttaagcccttggacttagtcactcatccagtttcttcttttaggatgtggatgtactacagccagttctggggcagtatacttaagaacctttaagtcaagagccatctgtagatgctggtgtggattgttcatcaattggcggggttccatttttccaggtatgtcatatcagataacccttccacatctgatgtaagtcattcatttactattcattataaaggtattgttcgtggtgagcagaacaacaaaaacctttcaattattccttaggatggcttgttaacgcttatgatttgaattatttacaaaaatctgatattgataaggggttttctgtagaataaatgaaggcagaatttgacttaatctacatccttagctgataatctttagctattgtatttattccttttctgcttgctatatactcagacactgagagcagtcatttctcttccttctacctttgacatgtaagtcttggaacctatctctgcccataatcagactttgaaggcaaagtgattgaaaagattgagagactggaggcctcttaggttatattagtgatttctcctgcctgaggctcttctcttgtaaactgttgccccatgtttcctgagcaccttgcctgctctaatccagtgtaattaaatcctgtgacctctcctacccactcttcttttttttttgagactgagtcacccaggctgaagtggagtggcacgatcttggctcacttaacctccgcctcctgagttcaagtgattctcctgactcagcctcccgggtagctaggattacaggcatgcaccaccacacctggctaatttttttgtatttttagtagagacagggtttcactatgtgggccaggctggtctcaaactcctgacctcaagttatctaccctcctcggcctcccaaagtgctgggattacaggcgtgagccactgtgcccagccctctacccacttttttttttcttttgagacggagcttcgctcttgtttcccaggctggagtgcaatggcacgatcttggctcaccgcaacttccacctcctgggttcaagtgattctcctgcctcagcctcccgagtagccaggattacaggcatgtgccaccatgcctggctaattttggttttttttttttttttttttttttttttttttttttttttagtagagggggtttctctgtgttggtcaggctggtctcgaactcccaacttcaggtgatctgcctgcctcggcctcccgtagtgctgggattacaggtgtgagccaccggcccggcccctcctacccactttttaacactgttgagaacatagttggtttatgattcatctcagcattgatgactgagtacacaatcaatgtcaccagtcccttaatgttctctatgggtaagtaggaggattccaatgaaatacaacttccaagtgaggctctataaagtgctggtatcttttcctctaatttgagggtacaagcctagacagagtgtgtgaaggaaaaatttccttacgtaggacattggtatctacatttacagttgaagttctacttctgagatgcatatgcttgtaccttttttttttttttttttttttaaatatatatagagagagggtcttgctatgttggccagactggtcttgaactcttggcctcaagcagccctcctacctcagcctcccaaaatgctaggattacaggcatgaaccactgcgcctggctgcttgtaccttttttgtgtgtatgtcttgttttgtttttttgtttttgagacggagttttgctcttgttgcccaggccagagtgcaattgcctgatcttggctcaccacaatctccgcctcccgggttctagcgattctcttgcctcatcctcccgagtagctgggattacaggcatgcaccaccacacctggctaatattgtatttttagtagagaaggggtttctccatgttggtcaggctaatcttgaactcccgacctcaggtgatccgcccgcctcggcctcccaaagtgctgggattacaagcgtgagccaccgcgctcggcctgtaactgttttttaatagatctacagctccttcccttaaggtctaaagattctccatccctgctttcaacagttaacaaagttccaactcagattctcataaattcctccctgtcttcctctgggcaattttattcccaaattcttgccaccttttgctttattccttactattagagaactataaatatgtttctttcagttttcatccttttcttctatcttataaagttaggaaagggggaaggataagagaacctggtgactacttaatccctggtcagaaatcgttttattattattatctgtggcattttgaattaggcttagtgattcagctatggcaaggaagtccctacagtaccagaaagggtttgggatggggttttagaccttcagctgaagtccagaaatgatcttttccctagtagcagtgtgatgtggggattttctctgcgtttaaaactttaaaagttggtttacaatttgtctcagcattgatgactgagtgtacaatgaatgtcaccagtccattaatgttctgtatgggtaagtaggattccaatgaaatagaacttccaaatgaggaatatgaaataggttttacaaataaaataaaatacaattttaaaaaacaagtaaaagtgtttttaaggtggcccatataccagtttctctgcttaaaacagaattggcttttctgcatgacagcaaatctttgtttccttagagcagggtttcttgacagcagtgctattggcattttaaactggataattctttgttgtgatgggctttcctgtggactgtactatgttggtacacaagaaaaacagtgtactatgtgaatactcactcaaagccagtagcactccctgattgtaacaccaaaaaagtctctcagcattgccaaatgtcccctgtggcagcagaatcactccctgatgagaaccactaccctggagtaaaatctataactatgtcttagaaaataacacagaaaattaatatttctttcactctactccttccattagtgatcaaataaagaaggcatttggcgctacttgccaaattgttggctcaaacttgtgctgaaccttttttggttttctacacttaagtttttttgcctataacccagagaactttgaaaatagagtgtagttaatgtgtatctaatgttactttgtattgacttaattttcccgccttaaatccacagcataaaaaatcacatggaaaagacaaagaaaacagaggcattaacacactggagaggtctaaagtggaagaaactacagagcacttggttacaaagagcagattacctctgcgagcccagatcaacctttaattcacttgggggttggcaattttatttttaaagaaaacttaaaaataaaacctgaaaccccagaacttgagccttgtgtatagattttaaaagaatatatatatcagccgggcgcggtggctcatgcctgtaatcccagcactttgggaggctgaggcgggtggattgcttgagcccaggagtttgagaccagcctggccaacgtggcaaaacctcgtctctgttaaaaattagccgggcgtggtggcacactcctgtaatcccagctactggggaggctgaggcacgagaatcacttgaacccaggaagcggggttgcagtgagccaaaggtacaccactacactccagcctgggcaacagagcaagactcggtctcaaaaanaaaatttaaaaaagatataaggcagtactgtaaattcagttgaattttgatatctacccatttttctgtcatccctatagttcactttgtattaaattgggtttcatttgggatttgcaatgtaaatacgtatttctagttttcatataaagtagttcttttataacaaatgaaaagtatttttcttgtatattattaagtaatgaatatataagaactgtactcttctcagcttgagcttacataggtaaatatcaccaacatctgtccttagaaaggaccatctcatgttttttttcttgctatgacttgtgtattttcttgcatcctccctagacttccctatttcgctttctcctcggctcactttctccctttttatttttcaccaaaccatttgtagagctacaaaaggtatcctttcttattttcagtagtcagaattttatctagaaatcttttaacacctttttagtggttatttctaaaatcactgtcaacaataaatctaaccctagttgtatccctcctttcagtatttttcacttgttgccccaaatgtgaaagcatttcattcctttaagaggcctaactcattcaccctgacagagttcacaaaaagcccacttaagagtatacattgctattatgggagaccacccagacatctgactaatggctctgtgcccacactccaagacctgtgccttttagagaagctcacaatgatttaaggactgtttgaaacttccaattatgtctataatttatattcttttgtttacatgatgaaactttttgttgttgcttgtttgtatataatacaatgtgtacatgtatctttttctcgattcaaatcttaacccttaggactctggtatttttgatctggcaaccatatttctggaagttgagatgtttcagcttgaagaaccaaaacagaaggaatatgtacaaagaataaattttctgctcacgatgagtttagtgtgtaaagtttagagacatctgactttgatagctaaattaaaccaaaccctattgaagaattgaatatatgctacttcaagaaactaaattgatctcgtagaattatcttaataaaataatggctataatttctctgcaaaatcagatgtcngcataagcgatggataatacct

SEQ ID NO: 349 - DNA, 22 bp, Artificial Sequence
  Primer
cttcctcatggcactaacagtc

SEQ ID NO: 350 - DNA, 22 bp, Artificial Sequence
  Primer
aagtcactcgtaaaccgcttcc

SEQ ID NO: 351 - DNA, 20 bp, Artificial Sequence
  Primer
aacagagacaagcctatcaa

SEQ ID NO: 352 - DNA, 20 bp, Artificial Sequence
  Primer
tattgctttggaacggtaga

SEQ ID NO: 353 - DNA, 20 bp, Artificial Sequence
  Primer
ccaaacataccttctgtaaa

SEQ ID NO: 354 - DNA, 19 bp, Artificial Sequence
  Primer
acaaatgggcattcctgtc

SEQ ID NO: 355 - DNA, 18 bp, Artificial Sequence
  Primer
ggacagcccagtcaaatg

SEQ ID NO: 356 - DNA, 18 bp, Artificial Sequence
  Primer
gggagggctccattgatt

SEQ ID NO: 357 - DNA, 20 bp, Artificial Sequence
  Primer
ggaggccggctctcgaggtc

SEQ ID NO: 358 - DNA, 20 bp, Artificial Sequence
  Primer
gggtcagcacttcgcatcaa

SEQ ID NO: 359 - DNA, 18 bp, Artificial Sequence
  Primer
gacaggaatgcccatttg

SEQ ID NO: 360 - DNA, 18 bp, Artificial Sequence
  Primer
caagtcctccagcgttct

SEQ ID NO: 361 - DNA, 22 bp, Artificial Sequence
  Primer
ccacaaacacagggcagtaagt

SEQ ID NO: 362 - DNA, 22 bp, Artificial Sequence
  Primer
tctcatttcagaggtgcatgtc

SEQ ID NO: 363 - DNA, 20 bp, Artificial Sequence
  Primer
agtggagccctcacattgtc

SEQ ID NO: 364 - DNA, 22 bp, Artificial Sequence
  Primer
ataaataaaactcatctttgga

SEQ ID NO: 365 - DNA, 22 bp, Artificial Sequence
  Primer
tgtatgctcctgttgctaatca

SEQ ID NO: 366 - DNA, 22 bp, Artificial Sequence
  Primer
gcaccattatataagcgtaagt

SEQ ID NO: 367 - DNA, 18 bp, Artificial Sequence
  Primer
tacctgcccgtgtcctgt

SEQ ID NO: 368 - DNA, 19 bp, Artificial Sequence
  Primer
tggaagaattgcctagact

SEQ ID NO: 369 - DNA, 22 bp, Artificial Sequence
  Primer
gtattggcctgatggagtaagt

SEQ ID NO: 370 - DNA, 22 bp, Artificial Sequence
  Primer
taacacctggaacataagtctc

SEQ ID NO: 371 - DNA, 19 bp, Artificial Sequence
  Primer
tagaggaacaggggagacg

SEQ ID NO: 372 - DNA, 20 bp, Artificial Sequence
  Primer
tgcttctggactgatacctt

SEQ ID NO: 373 - DNA, 22 bp, Artificial Sequence
  Primer
cagagtcattccttatgatatt

SEQ ID NO: 374 - DNA, 22 bp, Artificial Sequence
  Primer
ggcaaatctttgtgaactactt

SEQ ID NO: 375 - DNA, 19 bp, Artificial Sequence
  Primer
ttgtgccagctttagatac

SEQ ID NO: 376 - DNA, 20 bp, Artificial Sequence
  Primer
aaagccaccccaagttagat

SEQ ID NO: 377 - DNA, 22 bp, Artificial Sequence
  Primer
ctaatttacaaagtgccattga

SEQ ID NO: 378 - DNA, 22 bp, Artificial Sequence
  Primer
cataggaaggatgagaatacca

SEQ ID NO: 379 - DNA, 19 bp, Artificial Sequence
  Primer
gtaatgggcagaggctgtg

SEQ ID NO: 380 - DNA, 19 bp, Artificial Sequence
  Primer
caggggcaagaaattaaca

SEQ ID NO: 381 - DNA, 22 bp, Artificial Sequence
  Primer
atgtcctttcactagaacactt

SEQ ID NO: 382 - DNA, 22 bp, Artificial Sequence
  Primer
tagtcccagggtcacagttgag

SEQ ID NO: 383 - DNA, 18 bp, Artificial Sequence
  Primer
agcggtctcctgcgatgt

SEQ ID NO: 384 - DNA, 18 bp, Artificial Sequence
  Primer
cttgagcccaggactttg

SEQ ID NO: 385 - DNA, 22 bp, Artificial Sequence
  Primer
cttgcctttaaaaactaagaca

SEQ ID NO: 386 - DNA, 22 bp, Artificial Sequence
  Primer
gcaggagttctgtaatacatct

SEQ ID NO: 387 - DNA, 21 bp, Artificial Sequence
  Primer
cctaattttatacatcaagca

SEQ ID NO: 388 - DNA, 20 bp, Artificial Sequence
  Primer
taaacaaactgcctgataaa

SEQ ID NO: 389 - DNA, 22 bp, Artificial Sequence
  Primer
acagaaatgttatgtattgtgg

SEQ ID NO: 390 - DNA, 22 bp, Artificial Sequence
  Primer
acactcctatttgggtacttag

SEQ ID NO: 391 - DNA, 19 bp, Artificial Sequence
  Primer
atggttttcactaatggga

SEQ ID NO: 392 - DNA, 21 bp, Artificial Sequence
  Primer
ctacaaatatgttggctcttc

SEQ ID NO: 393 - DNA, 22 bp, Artificial Sequence
  Primer
gaaagaaagaagcgtatgacac

SEQ ID NO: 394 - DNA, 22 bp, Artificial Sequence
  Primer
ccaaaaagcaagcccctaccaa

SEQ ID NO: 395 - DNA, 20 bp, Artificial Sequence
  Primer
gaagcgtatgacacattgat

SEQ ID NO: 396 - DNA, 20 bp, Artificial Sequence
  Primer
tctacaaatatgttggctct

SEQ ID NO: 397 - DNA, 19 bp, Artificial Sequence
  Primer
accccactctatgaatcaa

SEQ ID NO: 398 - DNA, 18 bp, Artificial Sequence
  Primer
caaggcaaaaatggagag

SEQ ID NO: 399 - DNA, 20 bp, Artificial Sequence
  Primer
aaataaggctctacctcaaa

SEQ ID NO: 400 - DNA, 20 bp, Artificial Sequence
  Primer
aatggaagttctttaggtgg

SEQ ID NO: 401 - DNA, 18 bp, Artificial Sequence
  Primer
ccccgaaaatgttcaata

SEQ ID NO: 402 - DNA, 28118 bp, Homo sapiens
tctcaggaatatgctggtaaaataaaaataacctttagagatgcccaaactgttttccccagaacaccagcattcattaggtgttcattcaatagattcttcaaaggattccaaaggcaaagaagtttggggaacagtatatataattacccaaccctttgacattagcatactaagggccctgagaagttttggattcagaaagttttcaaattaaagtaacccagaattttctaagattatttgaccatgaaacatatgtctccccacaaagcacatattcctatctccttgaacttgaggataattagacgtacgtgggcagagggtaggggaagggggtatggcatagaaagagcaggaccttgggagcaagaatatctaagtttaattcctgactctgctatttattaactaaccatctttgccaatgttgcttaagcttttttggctacatttttttatttgtaaagtaagtttaataatcactcatctcactgggctataatgataagtattaagtaaggaagatccacatatgtgagttgctggcttataattcacactcaagagatactgattttgtcaattgtcctttcccctttttttctctcttccctccttccattccttcttcccttacctctcctttccttccctcacaccccttttccttccttctttttacatttttttatttaaatgaacttttcattttggaatagttttaggatttcaaaaaatttgcagagataatacagagaatgcccatataccatcctccttatcccacttctttttgtgtctattagatgctcagagtgtgtgcacaaggctggcacgcccagggtcttcctcatggcactaacagtctactgaaaggtggaacagagacaagcctatcaacacctacaagactggtggtaagtgcagtgacagatgcaaaacacagggtgatggaaagccctcaggagggtaacctaacctagatttgagggcccaaacaggctccagaagaaaatgtcaactgagaggaagcctgaaggatgaacagtgggctaagcaaagggttattaatgtgttattaatgggttgaatctaattgggaagggagagaggttgcagagtgaggtgcagagcttggtggacgatgccaaaggaatactgaaacctttagtgtgtccagtctggaactgcatccaaattcaggttcagtaatgatgtcattatccaaacataccttctgtaaaattcatgctaaactacctaagagctatctaccgttccaaagcaatagtgactttgaacagtgttcaccagagcacgaaagaattacaagatttttttttaaagaaaattggccaggaaataatgagtaacgaaggacaggaagtaattgtgaatgtttaatatagctggggctatgcgatttggcttaagttgttagctttgttttcctcttgagaaataaaaactaaggggccctcccttttcagagccctatggcgcaacatctgtactttttcatatggttaactgtccattccagaaacgtctgtgagcctctcatgttgcagccacaacatggacagcccagtcaaatgccccgcaagtctttctctgagtgactccagcaattagccaaggctcctgtacccaggcaggacctctgcgctctgagctccattctccttcaagacctccccaacttcccaggttgaactacagcagaagcctttagaaagggcaggaggccggctctcgaggtcctcacctgaagtgagcatgccagccactgcaggaacgccccgggacaggaatgcccatttgtgcaacgaaccctgactccttcctcaccctgacttctccccctccctacccgcgcgcaggccaagttgctgaatcaatggagccctccccaacccgggcgttccccagcgaggcttccttcccatcctcctgaccaccggggcttttcgtgagctcgtctctgatctcgcgcaagagtgacacacaggtgttcaaagacgcttctggggagtgagggaagcggtttacgagtgacttggctggagcctcaggggcgggcactggcacggaacacaccctgaggccagccctggctgcccaggcggagctgcctcttctcccgcgggttggtggacccgctcagtacggagttggggaagctctttcacttcggaggattgctcaacaaccatgctgggcatctggaccctcctacctctggtgagccctctcctgcccgggtggaggcttaccccgtcttagtcccggggataggcaaagtggggcgggcgcgggacgcgtgcgggattgcggcggcagcggcgcacgcgggcacctgggagcggcgggctgctgcgggaggcgttggagactggctcccgggggctgttaggaccttccctcaggcccgggtgctcagaacgctggaggacttgcttttcttgggccttgatgcgaagtgctgaccccgctgggcaggcggggcagctccggcgctcctcggagaccactgcgctccacgttgaggtgggcgtggggtgcggacaggaattgaagcggaagtctgggaagctttagggtcgctggagggggaccccggttggagagaggagcggaactcctggacaagccctgacaagccaagccaaaggtccgctccggcgcgggtgggtgagtgcgcgccgccccgcgggggcggggagagagcctgcagccttcagaacagatattgctcattttctggcagttctcagacgtaggaaataagtcagcaccgaagcagtggttaagccggagggctcggaagaacggcaccttttctttctcgaaaaagttatatgggggctgaatgagcttctggaggcttgtttaccgttttttattgtcacacagaaaaagaaactgccttgtctcccttccgggaattctctctttaagactgtaagtcgctgcctgagtggtttcattttgttttgtttttctgcccttctctttcttcttttgccctttcttagcttgcactcccatggtgatttctgcttggtctcctgctggggttggtggtactcgttcccaccgcacagaacccggcgcctattattggccaagaaacttgagcagcctgttttgaaaagtccctcgctcagaaatgccagcttgcagatggctaatcaaagagacgtggatccaggaggctcatttgagtaccggagcctctgagagtccatggatttttattttattgggccccaacaaagtgccaggcatagcgagagaagtgtttacaaatgtgatctccgcggattctcacgagagccatgtagtggggaagataaccacatccccattttacagatggcgaaatgaggttcagagagcttcagtaattcagccaagatcacacagctagtaaatgggagatatgggattgaactcagatctaattccaaaactcaggctgttcgctgattgcatctgatatccagattacaccaagaggctgagatgtctgggtccattttatgattagaaaaaaaaatcctgttcctttcagaaatagtgtgcactatttgggattctttagaaacttccttggagaaaattaatgattcaagattgagaaaacatttatacaacctcaggccacactcttctctctcttgttattaaccattgcaccactgcaatgttggctgctttgaaaatctcatagtttttggacagcagtattagtaaagtgtaagaaaattgtcaaagcttggagctatgcttgttgaacttttgtaccaatagcacctttaccagaggctgcgtgtttaaagcccgaagaaaactttgcttttctgaaagaatacacacacacacgcatatgtaaatattcatacatttatgtatatatacatattataatacctataagttaggtataacttatatttgtatatgatatatggcctaggaaattaaggcttattaaataaaatttataaatgcagatgagtcaaatacaaagatcagacataactctatcacctaagtaatcattgtttacgttttgcagtttatcttccatttctcccctctaatatgactcttttaaatttagttacacagaaattggttttgcgctcacgacatgcctaacatcaggcctttatccttaaagaagtttcaacactcttgtgtcacctcatgtgtctacagaaaatgtttgcttttatgccttcacggttatgttttcttagtagtagcaataaataaaatagatgcaaagtgctaattacttggaatacagaagcaaattttaattctattaatgggctggacatagatgggtggggagctgttttctgcttttcccctcttcccctagtcctctgactctggtgataactatagtcaacaagtatccccatccttaaccccttttgcttctctttctctttccttctctcaaccttcctggtgttagttttctctttcctatttctgagtgtttttactccgacacttacaataaaaaagtttgaaatcccaaaaagttgacaaatttctaaaggagacagaaaaagagtcaaacttactttacaaattaatttgagaaatagctgtgggttgcattttttttttttattgtgcatgaccctgttattggccaagaaacttgagcagcctgttttggaaagtccctcgctcagaaatgccagcttgctaattgaagggatgtggatccatgaggctcatttgaattccgaagcctctaagagtccatggatttttattttattgggccccaacaggttttgtcttgcattatttaggacattggccaggcaatcactggacagccagtttgctctcctttacattttgtagaatggttatcttatggtcaaaggaaagggagagggcctttggaaaataaagctgtgtatttacaagcagtcatacagaatagttttgtggggaaaataaagaacagttatttaatttgtaatttaatcatttttcttaaaccaacccaaagagcataaaatggaatatttatttatttttgtagcttaatttgtaatttaataatttttcttaagccaacctaacgaacatattgggctgtttattttcatttttaatgggccatatttacatcacaaaggacttgagaagtcttacaaatacaataaaatgataaaatatgaattaagacattagcaaccaggatggaaaaacacaaatttgtaaatgatggccaggtttgcaagcaaaaattaaattgataaatggcagcacccccactaccagctatagttagactgatgaaaaatcctctaatgttcatgcctgaaatacagttaccacccttagcagcaaattagaggcaaagaagttctggaatttggacgttgtctctgagtaagctctttgagacactggacaagtaatttccttctgaatactcttatactgacacataggagaagtgtcagtgtttcaaaggaatctctttgaaggctactacattgctttaggggtgccagattaccagagtaaactgccagtttgagagaataactgtttcttaagagatggtctgaaacctaagtaaggaaatccccccacttgaaagcccctaggaagttaattgcttttggcaaattatcttgggccccaaaagtcccttgatgagcacatgttttgtaataggtactaaagactatttacttatgatgaaaaataaaataacacaatttaaaacttgaaattgataaaaagcaacttgaaaccaaatttaggacagtgaacccatccctttcttatttttaaataggtaaatatagaaaaaatgaccacatgatgtgaaacaaaaagcaaatatttaaaaactacatttatactttatctcaccacactaatgtaaagaattttgattttacttataaattcttagccttgtctacacatatacataattgcatgtttaatttgagctatatatagtctgttttttgttcctttgcatgttacacaaacctttttctatttctacataatttttatctcatattttttattggatacattatagagagagcatttattaaatgagctgggattactataatttttattatttattttttaatttattacttatttttataatttactattgaaaaaaagcatttcttaaatgtactgggatacatatatatatatgactttttcttgttactaaaaaattactcatagaacttacatattaaaattttaggacttgtgatgaaaaataataaaataattcaaaacgataaaaagcaacataattttatatgttgtaccttgtacttccttataaggtacaacactacaatagccttagtgtgtagttttctttttgctatgtatgtatatatatattcataaaagtggaaaaataacatttaataaatcctctttattttctggaaaatccttgctttaaaaaaagtctttagctttttatatagttctacttctaacaccaattaaatatcttcaattcagtctcaagcaggaacaaatcttcagtccacttgcctacctttactgtctttgaagtgacagtgtgagtagtaaagcccaaatcagagagaaattgacttttgtaagattggtaacttcaccttccccggaaggaaatgaggtggttcttccctttgatcacaactgctttcttgatttgaaataaactgttgtacagcccagtcaccccatctttagacatttagaaatggcaatcatagttatataggacaactagcctgagtcccactaagtagaaatgatagtgaatttagtataagattatacctttaggctgggcaggtgactcacacctgtcacccagcacttcaggaggccaaggtgggtggatcatggatcacttgagattaggagtttgagaccagcctggccaacatggcaaaaacccaactctactgaaaatacacaaattagctgggtgtggtggcgtgcctgttatctcagctactcgggaggtcgcggcaggagaatcactggaacctgggaggtggaagttgcagtgagccaagatcatgccactgcactccaggctgggcgacagagtgagactccgtctacaaagaaaacaaagaaacaaaaaatcatacctttagagcaaggccagccttgtgaattagcaaatctgactacaaattcaatcagcagatgtactcagcccagcaaagtgagcaagcttactataggttgtgttaaggcatggactgggataaactggcaaaattagagtaaatttgacaatttgacattggattcattaatgatagcctgtccttcaatgaagtcaggcagcattgtgtttctattcacctctgtgttttgtgaggctataaaaatataagatatgagaaatgtgaatactttttatttgtgagggcagatatcttgaaaaagagagcgagaggaagtcagagtatgcgggtgaagactcttgtttttttgctgaggatttagctttggtttttagccattctcacagagatcattggtcctaattaactggttgttgttgttttttttcatgtgaatgtctgtaaggtttcaggcttgattttaaaaattgggcctatactcacagaaagacaaatactgcatgatctcgtttatatgtggaatctaaaagttttgaatccataaaagtagagagtagaatagtggttaccagaggctagttgggggcaaagttgggggatttagggagatattggtcaaaggatacaaaatttcagttaggaggaataagttcaagagatctagtgtacaacttgatgtctatagctaataacaatgtattgtatacttgaaaattactaagagtagattttaagtgttctcgccacacacacacaaaagaaaatgataagtatgtgaaggaatgcccaatgtaattagctcgatttagctaattatcttccaaaatatgtacataattatcttccaaaatatgtacataattcaagacatcatgttatataccataaatatatataatttttttatttgtcgaataaaaataatacaaaaaaaccctgggcctatactgcccacaggtagtggccacaggcagagctggtcccaagcccctccctctctctgtagtcccttatcccaggttgctttattcttgtatgacccacgtggcccctctgggcttgtaagggctctggggctgtattttaggactctatagcccttacattacccatttcctctaccaaaggtcatttctcttatcttcaagcttatttttggaagggtcattatttcttcatgagaagtcaaattctgatttgcaagtgctgaacacagatgccattagtctataaaactcttatattctcacatgtaaatgtagtaacctgctaacctcagattctgcttcctctaacctagttgccctgcaactgtgatgaacctcaaaatcaccaagggtacttccccattctcagagatcctgattccttaggtctatgtaggggccttagcactttttattaaataatgcatcactacaggattctgatgtctgtcggggtcttgagaactatttttctgactctagcactaaactcaaaatgtaatttcagatggaatttcctaggctcattcattttattttatttatggcttggccagtcatggatctaatcagtaacttgcaactgttgcttcaactacctctgtcctggactttccagagattggctttaagaaagaaagaggacatccctgggataagattaccatgtgtatttttatgtacagattttgaaaaacatacaaatgaatgggatctttgcttatctcttccatgtagaaaaatttattttacttctatttcaggttttcaataatgtagtaggacaagatgacatcactatatccctgttttttacacagatatattagagatgcattatcttattggaaattttaaactattcaataataaactattagtcttttagaatttctttttcctcaagtgttgataagtaactgaaagtctacaagcagacaagcagaattagtcggtggaacttcatttcttgctccatttttgtcctcagcagtagagggtggtgagatttcaacccagcctagcaggaccaataagtctggaaagaagtagctctagttcatattggcacctgctaattctagttctgaagaccatgggaaatctcttgcctatttagctcagtgatcatccaagatgggaaattcttgggctcagctgtgagggatcccaagtttatatgtaacactaatgtctcacaaatcaagaatccaagagaatcaagagactatagttcattccttatattaaattcttaggactgccaactgggtggctacagttttgggggctagaagtctgatatcaaggtgccaactggactggttccttctgaggaccacgagggcaggatctgttcaggcttgtagatggccttcttttccatgtgtcttcacattatcttcctctgtttgtatgtgtgtccaaatttcctcttctttttttttaatttagaaatttatactgtctacaagctttatatagctttagttaaaaaaaagcaaaaaaaaaaaaaaatcaaaacaaaaacagtgaagccaagacactcttccaaagtctggacccttccggccttccaaatacaagagctctggaagttgtatataccaaatttcctcttcttaaaatgtcaccagtcacattggattaaggcttaccctattaacaccattttaacttaatcacctctgtaaagaccctatctcctgatacagtcacattcggatgctcaggaagttagggtatcagtatcactatatgaatttgggagttgggggaggacacagtttagcccatgacagtcctgaatctcctttgctagatgcatgactgtgggccagtcacttcaccagttgggatactgccatctctatcagaaaaggggtttgggctaggtcatctataaagtcctttctgctctaaattgtaaatataatgagataccaacatttagtttaattgtttaaaattttagaagctaactggatgctttgctggtgtcaacactcccctttacaaaaaaaaattcggccgggcatggtggctcacgcctgtaatcccaacactttgggaggccgaggcaggcggatcacggggtcgagagattgagaccatctggccaacatggtgaaaccccgtctctactaaaaacacaaaaattagctgggcctggtggtgcacatctgtagtcccagctactcgggaagctgaggcaggagagtcacttgaacccgggaggcggagcttgcagtgagccgagatcgcgccactgcacctccagcctggcaacagagcgagactccgtctcaaaaaaataaataaataaataaaataaaataaaataaaataaaatctcactttctgtttctactgttctctcaagtacccctctgccttctgttacttctttgctgcattctgagaggaatggggtggggagcactctttcctgtagaaccccataacccatctattttcatcaatttatttgaaattcaaagccaggggttaaaatgtccactttcaatttgagatgtctaactttcagataaatctattaacatgcatttctaagtgacttttaagctaagcattttattttattgagctcgtatggaagggtaactattatacttgtataataaagtgcactttcaaaaatactcggttcaaatgtaaaataatattcgtaatattttaagacaaacctcctagaacttatatgtgtctttcttcccagagcagtctctatgggtgcctaaacaatactgcattattagatttttttcagtttataagccacacaagaaagttaacccatgtcatctctagaggcataaaaatagacagttgttctgagaaacatatctgtttattcctagttcagtaacagcgcaatgagatcctaaattatgaggtactttttgtttatcttattgtctcattggcaaccagcaactcctgttgcatttttgacatgggaatctatcagggtgtggttaataaagtacatttccatggtaagtattctttaagaaaaaataaaccaagatttcatcagagacagaaattactgcaaactgtacttaccagtttctggtgatttgtataactgagctttcaatttcaaaaattaaaaagttctctttagtgtaacatatttttgtgtccagtaattttacttcaaaaataaaagagaattttctttaccatcaaacaacgttgctgtaatgagtggtgatatatttagtcctagaggaccaaagagaaataaaatggctttgattatgctggtttaagaaaatatatccgatgaaacagaggttaatatttgtgatgtttgatttagtaaaattataagactaccaaagaaaactagaagagcaaaataaccaaaatttatataaagaattcaatgttgataattcaaaggtttagaattttttccacctttcaaatactaagttgctgttatagatttactaccattattacccagattttctattttactaaaaaataataacacagttcgttatgataaatcagtatagatctttaggctcaacacaaccctgctaccttttaaacttttttattatacaacaaacacatatgcattatcaagaaaagatgagtttagcaaaatgaagaaaaatagtcttatcaactagaaataagcaccattaaaatttctgtgtgttaaaagataatatgctgctgaaactttttttttcttgaaatgtccctcttttctttcacttttcattttcttaatccctaaccttctactgttgaattttctggaccaccgttataccccctcatcaatagggcatttttttctgcagtagctgagcacaatggtcatattgaagaaattcccttgtgggggctttgcctagaggtaaaatcctcttggccgggtgcgttggctcatgcctgtaatcccagcactttgggaagctgaggcgggagcatcttctgaggtcaggagtttgagattagcctggccaacgtggtgaaatgccgtctctactaaaaatacaaaaaattagccgtcatagtgtgcattcctgtaatcccacctactcgggaggctgaggcaggagaattgcttgaatgccggaggcagaggttgtagtgagccaagatctagattgtgccactgtgctccagcctgggtgacagagcaagactccgtctaaaacaaaacaaaacaaaacaacaacaacaaaaacaaagtaaaaccctcttcactgtgatgactctaaagcttgcttttgtctctctaaatcacaacaaaccgtttgcagtgtgatgctgtgctcaaaattgagaattctcactgactgttccaggcatctgtctactcattcttgccatgctgagggctgtcatttctcaccactgaatgcctttttttttttttttgtgcttctttttaaaagtcttttcctgtttgctttgaacttcaataaaaacagggggtaagaaggtaatatgcttttattttgtctgtggggtttttttcttccttcttttggttccttttcagatcctagctcatcaaggccatttgccacactgacactggaataagcctgaatgggggtctatatttcttccagtagttagtttaattcggtcattgagctgttgctctatttgtaaccgtcatgctagatccgagggctgactattcctgagaaagtgtggagatcctttcagactgccatggtgctagggcagagtttcagtcattatcttctgtgtctgctaattcttgcatcatttcttctactctgtaacctggttggctatgaaaagtgattcttcctcactgatgctgcaggcaatgggtgaatatccaattgttctctcaggttcttgtcatcggatacaaagaacaaatttcatgtgtccctgtttctgagaggttcaaagggagcaaatgcacagattctagcttaggatgacttccagcttctaactatttgtctgtgcattccatttcctcacccctgcgagaggttgcagtcatggtaacggctgttctgagaaattcagtgcccaaactggagggaggggaacacaaactcagcttcttcccaagcttcagggcagggctggcaagttttgccttccccgccagcaagagccctggctttaggggtcttgctacagttttcccagactggaggtcttggggctggattctggttcttagcgaattcttgccaaacacctcccctttccccagtatccatttgttttgaaggttctttgcaggcttcttgccaataattgtcttaaaacaaatggagttgtttgcatacctagatggagtaaaatatttaggaaactattctacaaatatgaaacagcccagatttgggccagaagtcctggtcctgagtctcttgttagccactcttaactgtgaattattggacaaatcatttctcgcactctgtgtaatctgtcacctgggtacttgatgatttaaaccaggaattgtggcccttctcataatactgtctcctaaatattgggtgaatttagtatatcaaggagggcagggcactatacccgtaggggactctctctctccctctgtctctttgcctttctcagatatgcatctttggtggcagacctggggttcaaaccacagttgttttgaaatttctctttccttctccactatgctccccctcactgaaactttaataataaaagtagcacacttattgggcatgtatttgttatgtgccaggttctgtgctaacagctttaagtgcattattccacgtattttcacaacaagcctgtgaggaagaggttatttccacttatagataaagaaactgagacttggagaatgtaagtgattttacccacaaacacagggcagtaagtgggaggccctgttcaccttagaacacctggcttctatcattcatggtgctgtttctagtgtggtttgaagaacctgagatccaaactgctatacaagtgacctgctgctttcttggagagagaaatctgaaagacagtggagccctcacattgtctttgcctgtgcacagcagatactgccaattttgggtgggttacacttgtttaccacgttgcttacttcagaaatcaataaaattctcttcatgcttttattttacaggttcttacgtctgttgctagattatcgtccaaaagtgttaatgcccaagtgactgacatcaactccaagggattggaattgaggaagactgttactacagttgagactcagaacttggaaggcctgcatcatgatggccaattctgccataagccctgtcctccaggtatgttacacaaaacatccagagattacagtgaaagtcacagttaggagtagcacatagtaatcatgactataataattttacagtttttggttcccctatattatataacataactgagagaaaaacaactatgaaattattttccaaagatgagttttatttatatttatcacgcttatttgatgtggttatggataaatttaatttacaagtgacatgcacctctgaaatgagaagactggtctatttggctccatttttttctaagcaaaaatgactcatttgtgaatatgaaagcttatcatgtcaaaactgattaggatctaccataacaatagtggaactctgaaagcaagagacttctcctcttaagggatatgtctcagcacttcccttcaatcagaaggtctctaagaaagctgtcctggcactgaagcctgcaaaatatatttgcattttgcagctgaataactagacgaataagaaaagcaacaggcagaaaccaacagcttttttttttaaatcaatactttgaagggcaaactaatttcagatcacaaatccttcaaacactggtaaattagaagctaagcaaaatgcaattgtgcaaacatttcttcaactttgagtagagttgaaaaaaggaaaatagcacatgggttcatgtgatagattaatagaacaaaaaaggactgtagtatgtttcatggttgtcctcccaggcttccagcactcaagctgtaaaacaggatgggtcctgtttgtgaaaagattctaccagtctccctgtgcttcatgtccagattttaataaccgttatggaaaaatctcccctataacccaacccatttatacttaaacccatttacacttaaatcttctccaacacgaataaagaatggcgtcctggctttattataacctgctaaacacaatcaatttgctctatgaattgaaatctttgttcataattttaaaacctaaaatgtaaattaaaatgaacaaaatatgctttgcacatcaaactgtcaaggatttttgtctattgctttttcggttttgctttgttttattttaatttaagaagtgaatgtaaattgttacaaacttttaagaaatacatttggatatatgagtcaaaaatttgaaaaaaaattttttttaacttttttttcttattattatactttaagttttagggtacacatgcacaatctgcaggttagttacatatgtatacatgtgccatgctggtgcactgcacccactaactcgtcatctagcattaggtatatctcccaatgctatccctcccccctccccccaacccactgtttatacttgctaagatagcaattaatttatacgaaaataccctgagaaaataatcaaaaataaaggaaaatattgtacacatgatatttcattatcaatatgatgtaggattccttaggtaaattctggaatatttaaagactgaaatagtatgtatcaaagtcatgttttctgatatatttctaatataatcctcaattatataaaccttcttaagtaatttccaactgatctggctggattaactgattctccctgatccgtctataaaatatcctggatggcatccaaccatgttaaatactcttcccacttcaattccctcttgttgaattttaggcttatcaatatctaagttgcttccaaatctgtttatgctcattagtgttgtgatattcatatgtaatttgattgaatattgcataaattaatgaaatacaaatacagagaaaagacagattttatttctaagaaaactaggttgagtgctttggagaattcaataaagatgagctgctaaaatgttgttgatgaattttgtgagggaaaaataaaagttaagtagtaggaaaaatcacaaaaatctctaaagccattcatagagattattggtatgtttatgttttcctttcatcaaaaacgaagggagggagggagggagggagggaggagaaaaaaagaaagaaatgaaaaaggaagagaaaaatagacaaacaggaaattataggtgatgcattatggatgtgacttaagaaagaacctgggattataataacttctatatcacaaaattgtcaaatgattatatagttatattttataaattaaaacaaaatatttacagtatttttaagtgatttcctatgtaaattgacatttttgattaaatgatcaaagaagtcctccccacatcatcatattcaataagaaggattctatggtatactgcacacatatttcatatatacacattgtacatatatatatatacacacctgttatatatatgctcatgcatatacatgtatgtatgtattatatgcataggaatgcaacaaaataacggcaatatctccagattgttgatatatagttttttgtttgtttgtttgtctgtttttttgagatggagtctcactctgtagtccaggctgaagtgcagtggcatgatctcagctcactgcaacctctgccttctgggttcaagcaattctgcagcctcagcctcccaagtagctgggactacaggagcacaccacaacaccgggataattttttgtgtttttaatagaggcggggtttcaccatgttggtcagtctggtctcaaactcctgacctcaggtgatctgcctgccttggcctcccaatctgctgggattacagacatgacccactgtgcccggcctgatacataagttcttattatactttcctgccttttccaacatttctataataagcatatgtaccattatactaaaaaaagtattttaaaatctgattttcaataaaacaactacttattttcttattttaataaattttgttttcatactttggaggaacgaaagaacctgtggtttactgtatctccattataccaaggaagttgtgctaggcacattctgtaagataattcattaaagagaccaattcattcagagaccagtataataccactagcaaaaaataaaattatacttggacttgggttctgttttctttaaatattgctacaatgttatatagccctatgcactatttttgaattttgttctgggaatctccagtttgttttttactattgacagactattatctttacttactaaaatagcatatatatttacatgtcataatttgctcatgtagtaaatattttgttttatcaaaaagaatatatgaagttattaaggaattcatgttcctaggaaacacagcagaaattaattttgctgtataggtgagcagagcagattaaactgcttatatttttaaaactagttataccattaacaattagagtcactagtaatgtttttctcacacttcccttgatattttctgtcactttcttcttaattctctattcccttaccttcatctagctttccccatagcatttttttagcacttgatatcaatatatttatttgtgtattgtctgcctgcatcccaagaaggtgaagtctttggtgatgaagggtttatcttatttcctgcataatatcaaacttctaaaaagttcctaggactcaataggcatttaataaacacctatcagataaatgaattttttaagagaacacattacataatgctttctaatagcaatacagtgacaaactttatttttaagtaaattaatgcaaatatgtatattatttaaaattgtttgtttttaagataacaagcctgatagataataaattttggcataaatatgttaatgcttatcaaaactcatcagtacatatcctgtcttttgatgaaaaagtaatagaaaggggagaacaaagagaactctcatgctcactaggcaggccgagtgcagctctgacagcaatgcaagagaaatattactatctccatcatatgcaggatgaaatttaggcttggagaaaacaacacttcgttaaagattttatagctgctcaagatttgaccaaggcttttaaaacttcaaatgttcttttccttattacactgtttcttatcaggatttgtggactttggaaagtaaaatgaaaagtcagagcaatgtgagttagtttgataatctcagtggccagtaacagctatccccactctgaatatataccaaccaacctctcccctttctccaaggaagttagttcttggcaaaggcatttcatgcagtgtactttgtcattctaaccttcctttttttttgtatgctcctgttgctaatcatcctatttctatgggcttcagtcactcttttagcttttgtcttgggagactttctgtctgttgacatgacttttaaaataatcttctcccccattgtatttatatctcattagcctaccccccctccccttgtgttttagaagagttttattgtctgtcatccctctatagttcccaccctgttacctgcccgtgtcctgttcaaacacttgctccttttttccttgggcaggtgaaaggaaagctagggactgcacagtcaatggggatgaaccagactgcgtgccctgccaagaagggaaggagtacacagacaaagcccatttttcttccaaatgcagaagatgtagattgtgtgatgaaggacatggtaagagtcttaaaatgcaattgaaagaggccaatcttggaatttcatgtagaaccatttataagacaatttgaaattggggcctactgtggtgctatgttgacacacaggaaagggaaggacaggtggctagggtaccgcagaaccaggtgccgagctaactactggtctagacctttatgagtaagtctaggcaattcttccagatataggagaatgagtaaatatgaaccctaggaacagggttcatcagctcaaatcaaaagctcagaaattattttttttctggccttgacttacgcttatataatggtgctcgttcatggccagaaaaattcagaagcctgcagatacaaggacacagaaatccaaaaggtaggtaggaatgctccccctttctttggggatttagtttgtcctgataattccatctggggacctgaattttcatggatatctcaatgtattctaaggacccagattgaagtataacagaagtgtttctagttttgtttgacatgaagaaacctctggacataaagcttttcccatccctattcagcctataaagcaatgtttctcatccctggcagtgcattagaattgcttagggagctactaaaaatgtttcatgtttaggtcccatctcagggcaattacatcagagtctctgagtgaggaccttggtattggcctgatggagtaagtctggggtagagcctaacattctacatttttaacaagctcccaggtgatgctcatgctgccagtccccaggtcaccctttgagtgttaaggctagagactagaggaacaggggagacgtctaagtattggtgaggtttgtcttggttgctgctaaatgattgctggccatttcaacctggggtttcctgttctgtgtttaaacactgactgtattactggtgtcatgctgtgactgttgatataagcagtggatctcaaaaatccatgcagctcctgcccaccattttcatagtctgcttataattagccgctataactaatagtttccaaactgattttctaggcttagaagtggaaataaactgcacccggacccagaataccaagtgcagatgtaaaccaaactttttttgtaactctactgtatgtgaacactgtgacccttgcaccaagtaagttttagtctttctctgattaaaacactagatataacatgagagttatcattttcctagggaagtaacactgactgagagttaagaattagggttctagtcctgctttgcctccaagcaactagatgactgtttgctcatttaaacactggtgaacttcctgtgtaggtgacactttgctggccacttaagctaaagatatgagccagacatatgcctggcatcaaggtatcagtccagaagcacagacagtcaaggaaagcaatggttattgtgtttcaacagcatgagaatagcatcagaagagacttatgttccaggtgttacaaattatacagaaaaacttttcaactctgcctgaggagatggaggtgaagacatgaatgtgtctcatgacttgaatcttgaagaaagaaaagaaagagcattaacaggtgcacatggatggaatgcacattataggcagggaaacagcagctgcaaagagacaaaggaagctcaggaaaacagaatacctggctggagtgtaggaaagactgagaagcgttcagggctgaatcatgaagggccttgtcttttaggctaaagaggttggttttgacccaaagttagagaacctgccttgtaagtcatcttgggaagcttttaggagttcatctaataggcttaagaaataagcacatgatgccttatgttttatttgctaggaaaattttatgtacagttgtcccaggctctcccctggccacaagtgtctgagagtgcccctatgatgacaggctaggtaggcattggggaagcagctgacttagtaaaataataacaataatagtaattccaaatatttcataatcttgatttaattttcttgtcatcataaccttttgaaatagataatattatttccatgttattgatgagataaaaggctcatggcagtgtgacttcccaagctcacctagtcaggtaatgggcagaggctgtgaactcagacaacctgattgtgaatgtttgtctgtctgaaggaaatcacacatgaacctcttgagtctcctgatcaccaccggttgctaaaagtggcagcctctaagggccagctgagtaccctccctgagctacatcatgggcgtggctatcacctggccattttcttggtctataggaattttttgaaattacttttgacagtttattttaagagctagtttaagctataggatttacgtgttcagtttattactaggtttaagtttatttttgtatccacttcatctctcttgtgtgtcactattttcctatcttcctttaactcttgaaatcttaagacagagtcattccttatgatatttttcatccagccatccaaattatattaacttgtgccagctttagatactaatttagaaatatttgaaggaatacgtttgccagagatgcaaagatgaataaaatggcccctaatttacaaagtgccattgaaaattataaaggaattattctgccaggcttttgaatttctcctgtatttttttttctagatgtgaacatggaatcatcaaggaatgcacactcaccagcaacaccaagtgcaaagaggaaggtaattatttttttacggttatattctcctttcccccaaccccatggaaagatgtgaagaaaaaccaatcactcttgattactagaaagtcctttatttaatcttaaagattgcttattttcatataaaatgtccaatgttccaacctacaggatccagatctaacttggggtggctttgtcttcttcttttgccaattccactaattgtttggggtaagttcttgctttgttcaaactgcagattgaaataacttgggaagtagttcacaaagatttgcctcattcttacctataaaaagctaccactttggtagatttatgtattgttaatttcttgcccctgaatgcagccttgagagctgactgataagaacaaatgaaattattcctcagctagtttctgagcaacagttttggggcattgagtggtattctcatccttcctatgaacaggtgttctctgcagcagcagaattggccaaaaatcagaagcaattcttcactattcattgagatctccctatgcaaaaagagaacacaagaagcaaaggcattcccaggaaacacattgcagggaacactttaaaaacttgtacttcactgcctcctcttcctcggcctaattgcttgtttttaattatttctccttcttaacttaaaatactatggggacacatgttatacaaaggtgacttagtagagtcagtagaaaagccaaaattagatattatcataattagtctagaaaaatccctttaagtcattcatcaactacagggtcacaccaactttcagtaacttagaagtattcaattttcccttctcagaacaattatctgtttcttcagttcagttgaagaagaaagtttgccttgcctttagcggttgtttagctgaaaatacatttgggatatttaagcactgtaattgtgctcagagacatacagattcttctatctcacattgactttaatgcatacacctattgagtatgtatgcttgagttatttgtgtgtgtatttcatttctgggcatccatagcaagttgatgttgacttgcttgtcctacggcttctgcatcctgccatagtcttgccgtccacatctttgctggacagagagtggtgcttgccatatggtaagtcaaaagccatctccttgctaggccagcctgtggtaattagatgactaattaagatatgtcctttcactagaacacttgacttagtagtacgaaagttccaaaatcagcggtctcctgcgatgtttggccacttttaagtttcactgaatttctcctttttccttcttatatttctcttagtgtgaaagtatgttctcacatgcattctacaaggctgagacctgagttgataaaatttctttgttctttcagtgaagagaaaggaagtacagaaaacatgcagaaagcacagaaaggaaaaccaaggttctcatgaatctccaactttaaatcctgtaggtattgaaataggtatcagctttccttgaaaagaaaaatagagaaattagtgatttggctttttgttacttccttttacttttttgtttcttgtttgtttcattttgtttgagatggagtcttgctccatagcccaggctggagtgcaggggtgcaatcatggctcactgcagcctcaaagtcctgggctcaagtgatcctcctgcctcaactgtgaccctgggactacaggcatgcaccaccatgccaggttaattttttatttttattttttatagagacagggttcactttgttgcccaggctggtctcaaacttttgacctcaagcaatccttctgcctcagcctcccaaagttctgggattataggtgtgagccatcacatccggcctgttactttctttatttaaacattgcttgtgtttgtgggtgcataggttaaaggggcctcacagatgaattatgatatggtacccaaattaaaagtaaacttgtacacaaaaaccgtaagaatcaacaaaggagggaattgagagtgtgctgaaaatgagctgaaaaaagaacttggccaacctccatgttccgtgttgttgttatccctgcagagaaacagcctttaccaggcatgggttcagtatccaagcctgagcaaagagattgctcttaaagtttgtcataagggcacagcttaactttctctggctgccggttgaccttatgtctcaccatatcttttcccaacatggtatcaatatatttcagatagcaagaaatacaccgagaaaagaaaccagttgcacttaatggaattattttcttatttggggccagggctcagtgggagttaggattctttaaattaatatggtaaaaaaaatttcaatttgagccattttctggtattaagaataagaatagttacagggaagaaaattttagagtagttatatttattatttattttaataagtctatatgaaaaataacctcaacctattttatgaattctttaggtttcttgcctttaaaaactaagacaatattgcttagtttctggcaaggccggaacctttcagaataaaaattgaatggtaaaagtaaccttcttaatcacttaatctagcttcctaattttatacatcaagcaactgattgtacttctttctgaattaaggaaaaattagaagttcacatttagaatattctaaagatatatttttatttgtctttctctgcttccattttttgctttctaggaaacagtggcaataaatttatctggtaaggcttttatcattttatttcatagagatggcatcctttagagtaataggccaatttcagagtaaaataatgttactaatttcagtgacatattatgggatcttgttatttctcatacaattctacctgctcagcataaagcatttatcaggcagtttgtttaaatttataatgaatactcatagttaaaaataatcaagtaacaataagacacaatagtctgaggcttaagaaacttttccttcataatcagctagatgtattacagaactcctgcctaaaaagatctagaggttaaagtgtactgtagactcaggtattatcagtgtacccaactctataacaacatacatgattccattcagttgttctttgatctgtgatttagagataagatgatcataaactctttgcttatacttttagatttgtgggtcattgatcattggatccataagagatgttataggtgatcttttccaatcctcttaatttataaatgagaaaagaagatacagaaatgttatgtattgtggcccaggttatttaacaaattactgggtatatggcaggatttggagttagaactcaaggttgtcttgtttctgtattcccctagtcagctcttcatagacttttaggacttagctatattctgaagtactataaaaagagaaataaacatggttttcactaatgggaatttcatttagaaaaacaaattttcagactattttctatttttcagatgttgacttgagtaaatatatcaccactattgctggagtcatgacactaagtcaagttaaaggctttgttcgaaagaatggtgtcaatgaagccaaaatagatgagatcaagaatgacaatgtccaagacacagcagaacagaaagttcaactgcttcgtaattggcatcaacttcatggaaagaaagaagcgtatgacacattgattaaagatctcaaaaaagccaatctttgtactcttgcagagaaaattcagactatcatcctcaaggacattactagtgactcagaaaattcaaacttcagaaatgaaatccaaagcttggtctagagtgaaaaacaacaaattcagttctgagtatatgcaattagtgtttgaaaagattcttaatagctggctgtaaatactgcttggttttttactgggtacattttatcatttattagcgctgaagagccaacatatttgtagatttttaatatctcatgattctgcctccaaggatgtttaaaatctagttgggaaaacaaacttcatcaagagtaaatgcagtggcatgctaagtacccaaataggagtgtatgcagaggatgaaagattaagattatgctctggcatctaacatatgattctgtagtatgaatgtaatcagtgtatgttagtacaaatgtctatccacaggctaaccccactctatgaatcaatagaagaagctatgaccttttgctgaaatatcagttactgaacaggcaggccactttgcctctaaattacctctgataattctagagattttaccatatttctaaactttgtttataactctgagaagatcatatttatgtaaagtatatgtatttgagtgcagaatttaaataaggctctacctcaaagacctttgcacagtttattggtgtcatattatacaatatttcaattgtgaattcacatagaaaacattaaattataatgtttgactattatatatgtgtatgcattttactggctcaaaactacctacttctttctcaggcatcaaaagcattttgagcaggagagtattactagagctttgccacctctccatttttgccttggtgctcatcttaatggcctaatgcacccccaaacatggaaatatcaccaaaaaatacttaatagtccaccaaaaggcaagactgcccttagaaattctagcctggtttggagatactaactgctctcagagaaagtagctttgtgacatgtcatgaacccatgtttgcaatcaaagatgataaaatagattcttatttttcccccacccccgaaaatgttcaataatgtcccatgtaaaacctgctacaaatggcagcttatacatagcaatggtaaaatcatcatctggatttaggaattgctcttgtcatacccccaagtttctaagatttaagattctccttactactatcctacgtttaaatatctttgaaagtttgtattaaatgtgaattttaagaaataatatttatatttctgtaaatgtaaactgtgaagatagttataaactgaagcagatacctggaaccacctaaagaacttccatttatggaggatttttttgccccttgtgtttggaattataaaatataggtaaaagtacgtaattaaataatgtttttggtatttctggttttctcttttttggtaggggcttgctttttggttttgtcttccttttctctaactgatgctaaatataacttgtctttaatgcttcttggatcccttagaaggtacttcctttttaaccttaacccttttagtagttaaataattatttccataggttgctattgccaagaagacctcttccaaacagcacatgattattcgtcaaacagtttcgtattccagatactggaatgtggataagaaagtatacatttcaaggggtaggttttattattaagaaagccaaatgaggattttgaaatattctttcctgcatattatccattctagctacatgctggccagtgggccacctttcttttctgcaatttaatgctagtaatatattctatttaacccatgagtcccaaagtattagcatttcaacatgtaagcatgtcggtaagatagttgtgctttgcttagggttccctcctgtgttatggtctggaaagtgtctttaggcagaaagtctgagtgatcacagggttcactcattaatttctcttttctgagccatcatagtctgtgctgtctgctctccagttttctatttctagacagaagtagggcaagttaggtactagttattcttcatggccagaagtgcaagttctactttgcaagacaagattaagttagagaacaccctattccactttggtgaactcagagcaagaactttgagttcctttgggaggaagacagtggagaagtctttgtacttggtgatgtggtttttttcctcatggcttcacctagtggccccaagcatgacttctcccatgtcaatgagcacagccacattcccgagttgaggtgaccccacggtccagaatcatcctcattctggtgaacctggttctctttgtggtgggcatactgggtaggagaatcacccaaaggtcacccatgagctgcagaaaaaaaggctatttgca

SEQ ID NO: 403 - DNA, 28118 bp, Homo sapiens
  allele 199,213,843,1530,1550,14525,14714,18982,19069,20412,20552,23199,23416,24890,26359,2967,3103,5335,5345,6074,9374,9907: N is any
  allele 9936,10937,11200,11279,11359,11503,11511,11587,11694,11905,12193,12208,12238,18511,18567,18982,19069,20640,21585,22439: N ia any
  allele 23416,25081,26359,26878,27670: N is any
tctcaggaatatgctggtaaaataaaaataacctttagagatgcccaaactgttttccccagaacaccagcattcattaggtgttcattcaatagattcttcaaaggattccaaaggcaaagaagtttggggaacagtatatataattacccaaccctttgacattagcatactaagggccctgagaagttttggattnagaaagttttcaanttaaagtaacccagaattttctaagattatttgaccatgaaacatatgtctccccacaaagcacatattcctatctccttgaacttgaggataattagacgtacgtgggcagagggtaggggaagggggtatggcatagaaagagcaggaccttgggagcaagaatatctaagtttaattcctgactctgctatttattaactaaccatctttgccaatgttgcttaagcttttttggctacatttttttatttgtaaagtaagtttaataatcactcatctcactgggctataatgataagtattaagtaaggaagatccacatatgtgagttgctggcttataattcacactcaagagatactgattttgtcaattgtcctttcccctttttttctctcttccctccttccattccttcttcccttacctctcctttccttccctcacaccccttttccttccttctttttacatttttttatttaaatgaacttttcattttggaatagttttaggatttcaaaaaatttgcagagataatacagagaatgcccatataccatcctccttatcccacttctttttgtgtctattagatgctcagagtgtgtgcacaaggctggcacncccagggtcttcctcatggcactaacagtctactgaaaggtggaacagagacaagcctatcaacacctacaagactggtggtaagtgcagtgacagatgcaaaacacagggtgatggaaagccctcaggagggtaacctaacctagatttgagggcccaaacaggctccagaagaaaatgtcaactgagaggaagcctgaaggatgaacagtgggctaagcaaagggttattaatgtgttattaatgggttgaatctaattgggaagggagagaggttgcagagtgaggtgcagagcttggtggacgatgccaaaggaatactgaaacctttagtgtgtccagtctggaactgcatccaaattcaggttcagtaatgatgtcattatccaaacataccttctgtaaaattcatgctaaactacctaagagctatctaccgttccaaagcaatagtgactttgaacagtgttcaccagagcacgaaagaattacaagatttttttttaaagaaaattggccaggaaataatgagtaacgaaggacaggaagtaattgtgaatgtttaatatagctggggctatgcgatttggcttaagttgttagctttgttttcctcttgagaaataaaaactaaggggccctcccttttcagagccctatggcgcaacatctgtactttttcatanggttaactgtccattccagnaacgtctgtgagcctctcatgttgcagccacaacatggacagcccagtcaaatgccccgcaagtctttctctgagtgactccagcaattagccaaggctcctgtacccaggcaggacctctgcgctctgagctccattctccttcaagacctccccaacttcccaggttgaactacagcagaagcctttagaaagggcaggaggccggctctcgaggtcctcacctgaagtgagcatgccagccactgcaggaacgccccgggacaggaatgcccatttgtgcaacgaaccctgactccttcctcaccctgacttctccccctccctacccgcgcgcaggccaagttgctgaatcaatggagccctccccaacccgggcgttccccagcgaggcttccttcccatcctcctgaccaccggggcttttcgtgagctcgtctctgatctcgcgcaagagtgacacacaggtgttcaaagacgcttctggggagtgagggaagcggtttacgagtgacttggctggagcctcaggggcgggcactggcacggaacacaccctgaggccagccctggctgcccaggcggagctgcctcttctcccgcgggttggtggacccgctcagtacggagttggggaagctctttcacttcggaggattgctcaacaaccatgctgggcatctggaccctcctacctctggtgagccctctcctgcccgggtggaggcttaccccgtcttagtcccggggataggcaaagtggggcgggcgcgggacgcgtgcgggattgcggcggcagcggcgcacgcgggcacctgggagcggcgggctgctgcgggaggcgttggagactggctcccgggggctgttaggaccttccctcaggcccgggtgctcagaacgctggaggacttgcttttcttgggccttgatgcgaagtgctgaccccgctgggcaggcggggcagctccggcgctcctcggagaccactgcgctccacgttgaggtgggcgtggggtgcggacaggaattgaagcggaagtctgggaagctttagggtcgctggagggggaccccggttggagagaggagcggaactcctggacaagccctgacaagccaagccaaaggtccgctccggcgcgggtgggtgagtgcgcgccgccccgcgggggcggggagagagcctgcagccttcagaacagatattgctcattttctggcagttctcagacgtaggaaataagtcagcaccgaagcagtggttaagccggagggctcggaagaacggcaccttttctttctcgaaaaagttatatgggggctgaatgagcttctggaggcttgtttaccgttttttattgtcacacagaaaaagaaactgccttgtctcccttccgggaattctctctttaanactgtaagtcgctgcctgagtggtttcattttgttttgtttttctgcccttctctttcttcttttgccctttcttagcttgcactcccatggtgatttctgcttggtctcctgctggggttggtggtactcgttcncaccgcacagaacccggcgcctattattggccaagaaacttgagcagcctgttttgaaaagtccctcgctcagaaatgccagcttgcagatggctaatcaaagagacgtggatccaggaggctcatttgagtaccggagcctctgagagtccatggatttttattttattgggccccaacaaagtgccaggcatagcgagagaagtgtttacaaatgtgatctccgcggattctcacgagagccatgtagtggggaagataaccacatccccattttacagatggcgaaatgaggttcagagagcttcagtaattcagccaagatcacacagctagtaaatgggagatatgggattgaactcagatctaattccaaaactcaggctgttcgctgattgcatctgatatccagattacaccaagaggctgagatgtctgggtccattttatgattagaaaaaaaaatcctgttcctttcagaaatagtgtgcactatttgggattctttagaaacttccttggagaaaattaatgattcaagattgagaaaacatttatacaacctcaggccacactcttctctctcttgttattaaccattgcaccactgcaatgttggctgctttgaaaatctcatagtttttggacagcagtattagtaaagtgtaagaaaattgtcaaagcttggagctatgcttgttgaacttttgtaccaatagcacctttaccagaggctgcgtgtttaaagcccgaagaaaactttgcttttctgaaagaatacacacacacacgcatatgtaaatattcatacatttatgtatatatacatattataatacctataagttaggtataacttatatttgtatatgatatatggcctaggaaattaaggcttattaaataaaatttataaatgcagatgagtcaaatacaaagatcagacataactctatcacctaagtaatcattgtttacgttttgcagtttatcttccatttctcccctctaatatgactcttttaaatttagttacacagaaattggttttgcgctcacgacatgcctaacatcaggcctttatccttaaagaagtttcaacactcttgtgtcacctcatgtgtctacagaaaatgtttgcttttatgccttcacggttatgttttcttagtagtagcaataaataaaatagatgcaaagtgctaattacttggaatacagaagcaaattttaattctattaatgggctggacatagatgggtggggagctgttttctgcttttcccctcttcccctagtcctctgactctggtgataactatagtcaacaagtatccccatccttaaccccttttgcttctctttctctttccttctctcaaccttcctggtgttagttttctctttcctatttctgagtgtttttactccgacacttacaataaaaaagtttgaaatcccaaaaagttgacaaatttctaaaggagacagaaaaagagtcaaacttactttacaaattaatttgagaaatagctgtgggttgcattttttttttttattgtgcatgaccctgttattggccaagaaacttgagcagcctgttttggaaagtccctcgctcagaaatgccagcttgctaattgaagggatgtggatccatgaggctcatttgaattccgaagcctctaagagtccatggatttttattttattgggccccaacaggttttgtcttgcattatttaggacattggccaggcaatcactggacagccagtttgctctcctttacattttgtagaatggttatcttatggtcaaaggaaagggagagggcctttggaaaataaagctgtgtatttacaagcagtcatacagaatagttttgtggggaaaataaagaacagttatttaatttgtaatttaatcatttttcttaaaccaacccaaagagcataaaatggaatatttatttatttttgtagcttaatttgtaatttaataatttttcttaagccaacctaacgaacatattgggctgtttattttcatttttaatgggccatatttacatcacaaaggacttgagaagtcttacaaatacaataaaatgataaaatatgaattaagacattagcaaccaggatggaaaaacacaaatttgtaaatgatggccaggtttgcaagcaaaaattaaattgataaatggcagcacccccactaccagctanagttagactnatgaaaaatcctctaatgttcatgcctgaaatacagttaccacccttagcagcaaattagaggcaaagaagttctggaatttggacgttgtctctgagtaagctctttgagacactggacaagtaatttccttctgaatactcttatactgacacataggagaagtgtcagtgtttcaaaggaatctctttgaaggctactacattgctttaggggtgccagattaccagagtaaactgccagtttgagagaataactgtttcttaagagatggtctgaaacctaagtaaggaaatccccccacttgaaagcccctaggaagttaattgcttttggcaaattatcttgggccccaaaagtcccttgatgagcacatgttttgtaataggtactaaagactatttacttatgatgaaaaataaaataacacaatttaaaacttgaaattgataaaaagcaacttgaaaccaaatttaggacagtgaacccatccctttcttatttttaaataggtaaatatagaaaaaatgaccacatgatgtgaaacaaaaagcaaatatttaaaaactacatttatactttatctcaccacactaatgtaaagaattttgattttacttataaattcttagccttgtctacacatatacataattgcatgtttaatttgagctatatatagtctgttttttgttcctttgcatgttacacaaacctttttctatttcnacataatttttatctcatattttttattggatacattatagagagagcatttattaaatgagctgggattactataatttttattatttattttttaatttattacttatttttataatttactattgaaaaaaagcatttcttaaatgtactgggatacatatatatatatgactttttcttgttactaaaaaattactcatagaacttacatattaaaattttaggacttgtgatgaaaaataataaaataattcaaaacgataaaaagcaacataattttatatgttgtaccttgtacttccttataaggtacaacactacaatagccttagtgtgtagttttctttttgctatgtatgtatatatatattcataaaagtggaaaaataacatttaataaatcctctttattttctggaaaatccttgctttaaaaaaagtctttagctttttatatagttctacttctaacaccaattaaatatcttcaattcagtctcaagcaggaacaaatcttcagtccacttgcctacctttactgtctttgaagtgacagtgtgagtagtaaagcccaaatcagagagaaattgacttttgtaagattggtaacttcaccttccccggaaggaaatgaggtggttcttccctttgatcacaactgctttcttgatttgaaataaactgttgtacagcccagtcaccccatctttagacatttagaaatggcaatcatagttatataggacaactagcctgagtcccactaagtagaaatgatagtgaatttagtataagattatacctttaggctgggcaggtgactcacacctgtcacccagcacttcaggaggccaaggtgggtggatcatggatcacttgagattaggagtttgagaccagcctggccaacatggcaaaaacccaactctactgaaaatacacaaattagctgggtgtggtggcgtgcctgttatctcagctactcgggaggtcgcggcaggagaatcactggaacctgggaggtggaagttgcagtgagccaagatcatgccactgcactccaggctgggcgacagagtgagactccgtctacaaagaaaacaaagaaacaaaaaatcatacctttagagcaaggccagccttgtgaattagcaaatctgactacaaattcaatcagcagatgtactcagcccagcaaagtgagcaagcttactataggttgtgttaaggcatggactgggataaactggcaaaattagagtaaatttgacaatttgacattggattcattaatgatagcctgtccttcaatgaagtcaggcagcattgtgtttctattcacctctgtgttttgtgaggctataaaaatataagatatgagaaatgtgaatactttttatttgtgagggcagatatcttgaaaaagagagcgagaggaagtcagagtatgcgggtgaagactcttgtttttttgctgaggatttagctttggtttttagccattctcacagagatcattggtcctaattaactggttgttgttgttttttttcatgtgaatgtctgtaaggtttcaggcttgattttaaaaattgggcctatactcacagaaagacaaatactgcatgatctcgtttatatgtggaatctaaaagttttgaatccataaaagtagagagtagaatagtggttaccagaggctagttgggggcaaagttgggggatttagggagatattggtcaaaggatacaaaatttcagttaggaggaataagttcaagagatctagtgtacaacttgatgtctatagctaataacaatgtattgtatacttgaaaattactaagagtagattttaagtgttctcgccacacacacacaaaagaaaatgataagtatgtgaaggaatgcccaatgtaattagctcgatttagctaattatcttccaaaatatgtacataattatcttccaaaatatgtacataattcaagacatcatgttatataccataaatatatataatttttttatttgtcgaataaaaataatacaaaaaaaccctgggcctatactgcccacaggtagtggccacaggcagagctggtcccaagcccctccctctctctgtagtcccttatcccaggttgctttattcttgtatgacccacgtggcccctctgggcttgtaagggctctggggctgtattttaggactctatagcccttacattacccatttcctctaccaaaggtcatttctcttatcttcaagcttatttttggaagggtcattatttcttcatgagaagtcaaattctgatttgcaagtgctgaacacagatgccattagtctataaaactcttatattctcacatgtaaatgtagtaacctgctaacctcagattctgcttcctctaacctagttgccctgcaactgtgatgaacctcaaaatcaccaagggtacttccccattctcagagatcctgattccttaggtctatgtaggggccttagcactttttattaaataatgcatcactacaggattctgatgtctgtcggggtcttgagaactatttttctgactctagcactaaactcaaaatgtaatttcagatggaatttcctaggctcattcattttattttatttatggcttggccagtcatggatctaatcagtaacttgcaactgttgcttcaactacctctgtcctggactttccagagattggctttaagaaagaaagaggacatccctgggataagattaccatgtgtatttttatgtacagattttgaaaaacatacaaatgaatgggatctttgcttatctcttccatgtagaaaaatttattttacttctatttcaggttttcaataatgtagtaggacaagatgacatcactatatccctgttttttacacagatatattagagatgcattatcttattggaaattttaaactattcaataataaactattagtcttttagaatttctttttcctcaagtgttgataagtaactgaaagtctacaagcagacaagcagaattagtcggtggaacttcatttcttgctccatttttgtcctcagcagtagagggtggtgagatttcaacccagcctagcaggaccaataagtctggaaagaagtagctctagttcatattggcacctgctaattctagttctgaagaccatgggaaatctcttgcctatttagctcagtgatcatccaagatgggaaattcttgggctcagctgtgagggatcccaagtttatatgtancactaatgtctcacaaatcaagaatccaagagaatcaagagactatagttcattccttatattaaattcttaggactgccaactgggtggctacagttttgggggctagaagtctgatatcaaggtgccaactggactggttccttctgaggaccacgagggcaggatctgttcaggcttgtagatggccttcttttccatgtgtcttcacattatcttcctctgtttgtatgtgtgtccaaatttcctcttctttttttttaatttagaaatttatactgtctacaagctttatatagctttagttaaaaaaaagcaaaaaaaaaaaaaaatcaaaacaaaaacagtgaagccaagacactcttccaaagtctggacccttccggccttccaaatacaagagctctggaagttgtatataccaaatttcctcttcttaaaatgtcaccagtcacattggattaaggcttaccctattaacaccattttaacttaatcacctctgtaaagaccctatctcctgatacagtcanattcggatgctcaggaagttagggtatcngtatcactatatgaatttgggagttgggggaggacacagtttagcccatgacagtcctgaatctcctttgctagatgcatgactgtgggccagtcacttcaccagttgggatactgccatctctatcagaaaaggggtttgggctaggtcatctataaagtcctttctgctctaaattgtaaatataatgagataccaacatttagtttaattgtttaaaattttagaagctaactggatgctttgctggtgtcaacactcccctttacaaaaaaaaattcggccgggcatggtggctcacgcctgtaatcccaacactttgggaggccgaggcaggcggatcacggggtcgagagattgagaccatctggccaacatggtgaaaccccgtctctactaaaaacacaaaaattagctgggcctggtggtgcacatctgtagtcccagctactcgggaagctgaggcaggagagtcacttgaacccgggaggcggagcttgcagtgagccgagatcgcgccactgcacctccagcctggcaacagagcgagactccgtctcaaaaaaataaataaataaataaaataaaataaaataaaataaaatctcactttctgtttctactgttctctcaagtacccctctgccttctgttacttctttgctgcattctgagaggaatggggtggggagcactctttcctgtagaaccccataacccatctattttcatcaatttatttgaaattcaaagccaggggttaaaatgtccactttcaatttgagatgtctaactttcagataaatctattaacatgcatttctaagtgacttttaagctaagcattttattttattgagctcgtatggaagggtaactattatacttgtataataaagtgcactttcaaaaatactcggttcaaatgtaaaataatattcgtaatattttaagacaaacctcctagaacttatatgtgtctttcttcccagagcagtctntatgggtgcctaaacaatactgcattattagatttttttcagtttataagccacacaagaaagttaacccatgtcatctctagaggcataaaaatagacagttgttctgagaaacatatctgtttattcctagttcagtaacagcgcaatgagatcctaaattatgaggtactttttgtttatcttattgtctcattggcaaccagcaactcctgttgcatttttgacatgggaatctatcagggtgtggttaataaagtacntttccatggtaagtattctttaagaaaaaataaaccaagatttcatcagagacagaaattactgcaaactgtacttacnagtttctggtgatttgtataactgagctttcaatttcaaaaattaaaaagttctctttagtgtaacatatttttgtgtcnagtaattttacttcaaaaataaaagagaattttctttaccatcaaacaacgttgctgtaatgagtggtgatatatttagtcctagaggaccaaagagaaataaaatggctttgattatgctggtttaagaaaatatatccgatnaaacagangttaatatttgtgatgtttgatttagtaaaattataagactaccaaagaaaactagaagagcaaaataaccaaaanttatataaagaattcaatgttgataattcaaaggtttagaattttttccacctttcaaatactaagttgctgttatagatttactaccattattacccagattttcnattttactaaaaaataataacacagttcgttatgataaatcagtatagatctttaggctcaacacaaccctgctaccttttaaacttttttattatacaacaaacacatatgcattatcaagaaaagatgagtttagcaaaatgaagaaaaatagtcttatcaactagaaataagcaccattaaaatttctgtgtgttaaaagataatatnctgctgaaactttttttttcttgaaatgtccctcttttctttcacttttcattttcttaatccctaaccttctactgttgaattttctggaccaccgttataccccctcatcaatagggcatttttttctgcagtagctgagcacaatggtcatattgaagaaattcccttgtgggggctttgcctagaggtaaaatcctcttggccgggtgcgttggctcatgcctgtaatcccagcactttgggaagctgaggcgggagcatcttctgaggtcaggagtttgagantagcctggccaacgnggtgaaatgccgtctctactaaaaatacanaaaattagccgtcatagtgtgcattcctgtaatcccacctactcgggaggctgaggcaggagaattgcttgaatgccggaggcagaggttgtagtgagccaagatctagattgtgccactgtgctccagcctgggtgacagagcaagactccgtctaaaacaaaacaaaacaaaacaacaacaacaaaaacaaagtaaaaccctcttcactgtgatgactctaaagcttgcttttgtctctctaaatcacaacaaaccgtttgcagtgtgatgctgtgctcaaaattgagaattctcactgactgttccaggcatctgtctactcattcttgccatgctgagggctgtcatttctcaccactgaatgcctttttttttttttttgtgcttctttttaaaagtcttttcctgtttgctttgaacttcaataaaaacagggggtaagaaggtaatatgcttttattttgtctgtggggtttttttcttccttcttttggttccttttcagatcctagctcatcaaggccatttgccacactgacactggaataagcctgaatgggggtctatatttcttccagtagttagtttaattcggtcattgagctgttgctctatttgtaaccgtcatgctagatccgagggctgactattcctgagaaagtgtggagatcctttcagactgccatggtgctagggcagagtttcagtcattatcttctgtgtctgctaattcttgcatcatttcttctactctgtaacctggttggctatgaaaagtgattcttcctcactgatgctgcaggcaatgggtgaatatccaattgttctctcaggttcttgtcatcggatacaaagaacaaatttcatgtgtccctgtttctgagaggttcaaagggagcaaatgcacagattctagcttaggatgacttccagcttctaactatttgtctgtgcattccatttcctcacccctgcgagaggttgcagtcatggtaacggctgttctgagaaattcagtgcccaaactggagggaggggaacacaaactcagcttcttcccaagcttcagggcagggctggcaagttttgccttccccgccagcaagagccctggctttaggggtcttgctacagttttcccagactggaggtcttggggctggattctggttcttagcgaattcttgccaaacacctcccctttccccagtatccatttgttttgaaggttctttgcaggcttcttgccaataattgtcttaaaacaaatggagttgtttgcatacctagatggagtaaaatatttaggaaactattctacaaatatgaaacagcccagatttgggccagaagtcctggtcctgagtctcttgttagccactcttaactgtgaattattggacaaatcatttctcgcactctgtgtaatctgtcacctgggtacttgatgatttaaaccaggaattgtggcccttctcataatactgtctcctaaatattgggtgaatttagtatatcaaggagggcagggcactatacccgtaggggactctctctctccctctgtctctttgcctttctcagatatgcatctttggtggcagacctggggttcaaaccacagttgttttgaaatttctctttccttctccactatgctccccctcactgaaactttaataataaaagtagcacacttattgggcatgtatttgttatgtgccaggttctgtgctaacagctttaagtgcattattccacgtattttcacaacaagcctgtgaggaagaggttatttccacttatagataaagaaactgagacttggagaatgtaagtgattttacccacaaacacagggcagtaagtgggaggccctgttcaccttagaacacctggcttctatcattcatggtgctgtttctagtgtggtttgaagaacctgagatccaaactgctatacaagtgacctgctgctttcttggagagagaaatctgaaagacagtggagccctcacattgtctttgcctgtgcacagcagatactgccaattttgggtgggttacacttgtttaccacgttgcttacttcagaaatcaataaaattctcttcatgcttttattttacaggttcttacgtctgttgctagattatcgtccaaaagtgttaatgcccaagtgactgacatcaactccaagggattggaattgaggaagactgttactacagttgagactcagaacttggaaggcctgcatcatgatggccaattctgccataanccctgtcctccaggtatgttacacaaaacatccagagattacagtgaaagtcacagttaggagtagcacatagtaatcatgactataataattttacagtttttggttcccctatattatataacataactgagagaaaaacaactatgaaattattttccaaagatgagttttatttatatttatcangcttatttgatgtggttatggataaatttaatttacaagtgacatgcacctctgaaatgagaagactggtctatttggctccatttttttctaagcaaaaatgactcatttgtgaatatgaaagcttatcatgtcaaaactgattaggatctaccataacaatagtggaactctgaaagcaagagacttctcctcttaagggatatgtctcagcacttcccttcaatcagaaggtctctaagaaagctgtcctggcactgaagcctgcaaaatatatttgcattttgcagctgaataactagacgaataagaaaagcaacaggcagaaaccaacagcttttttttttaaatcaatactttgaagggcaaactaatttcagatcacaaatccttcaaacactggtaaattagaagctaagcaaaatgcaattgtgcaaacatttcttcaactttgagtagagttgaaaaaaggaaaatagcacatgggttcatgtgatagattaatagaacaaaaaaggactgtagtatgtttcatggttgtcctcccaggcttccagcactcaagctgtaaaacaggatgggtcctgtttgtgaaaagattctaccagtctccctgtgcttcatgtccagattttaataaccgttatggaaaaatctcccctataacccaacccatttatacttaaacccatttacacttaaatcttctccaacacgaataaagaatggcgtcctggctttattataacctgctaaacacaatcaatttgctctatgaattgaaatctttgttcataattttaaaacctaaaatgtaaattaaaatgaacaaaatatgctttgcacatcaaactgtcaaggatttttgtctattgctttttcggttttgctttgttttattttaatttaagaagtgaatgtaaattgttacaaacttttaagaaatacatttggatatatgagtcaaaaatttgaaaaaaaattttttttaacttttttttcttattattatactttaagttttagggtacacatgcacaatctgcaggttagttacatatgtatacatgtgccatgctggtgcactgcacccactaactcgtcatctagcattaggtatatctcccaatgctatccctcccccctccccccaacccactgtttatacttgctaagatagcaattaatttatacgaaaataccctgagaaaataatcaaaaataaaggaaaatattgtacacatgatatttcattatcaatatgatgtaggattccttaggtaaattctggaatatttaaagactgaaatagtatgtatcaaagtcatgttttctgatatatttctaatataatcctcaattatataaaccttcttaagtaatttccaactgatctggctggattaactgattctccctgatccgtctataaaatatcctggatggcatccaaccatgttaaatactcttcccacttcaattccctcttgttgaattttaggcttatcaatatctaagttgcttccaaatctgtttatgctcattagtgttgtgatattcatatgtaatttgattgaatattgcataaattaatgaaatacaaatacagagaaaagacagattttatttctaagaaaactaggttgagtgctttggagaattcaataaagatgagctgctaaaatgttgttgatgaattttgtgagggaaaaataaaagttaagtagtaggaaaaatcacaaaaatctctaaagccattcatagagattattggtatgtttatgttttcctttcatcaaaaacgaagggagggagggagggagggagggaggagaaaaaaagaaagaaatgaaaaaggaagagaaaaatagacaaacaggaaattataggtgatgcattatggatgtgacttaagaaagaacctgggattataataacttctatatcacaaaattgtcaaatgattatatagttatattttataaattaaaacaaaatatttacagtatttttaagtgatttcctatgtaaattgacatttttgattaaatgatcaaagaagtcctccccacatcatcatattcaataagaaggattctatggtatactgcacacatatttcatatatacacattgtacatatatatatatacacacctgttatatatatgctcatgcatatacatgtatgtatgtattatatgcataggaatgcaacaaaataacggcaatatctccagattgttgatatatagttttttgtttgtttgtttgtctgtttttttgagatggagtctcactctgtagtccaggctgaagtgcagtggcatgatctcagctcactgcaacctctgccttctgggttcaagcaattctgcagcctcagcctcccaagtagctgggactacaggagcacaccacaacaccgggataattttttgtgtttttaatagaggcggggtttcaccatgttggtcagtctggtctcaaactcctgacctcaggtgatctgcctgccttggcctcccaatctgctgggattacagacatgacccactgtgcccggcctgatacataagttcttattatactttcctgccttttccaacatttctataataagcatatgtaccattatactaaaaaaagtattttaaaatctgattttcaataaaacaactacttattttcttattttaataaattttgttttcatactttggaggaacgaaagaacctgtggtttactgtatctccattataccaaggaagttgtgctaggcacattctgtaagataattcattaaagagaccaattcattcagagaccagtataataccactagcaaaaaataaaattatacttggacttgggttctgttttctttaaatattgctacaatgttatatagccctatgcactatttttgaattttgttctgggaatctccagtttgttttttactattgacagactattatctttacttactaaaatagcatatatatttacatgtcataatttgctcatgtagtaaatattttgttttatcaaaaagaatatatgaagttattaaggaattcatgttcctaggaaacacagcagaaattaattttgctgtataggtgagcagagcagattaaactgcttatatttttaaaactagttataccattaacaattagagtcactagtaatgtttttctcacacttcccttgatattttctgtcactttcttcttaattctctattcccttaccttcatctagctttccccatagcatttttttagcacttgatatcaatatatttatttgtgtattgtctgcctgcatcccaagaaggtgaagtctttggtgatgaagggtttatcttatttcctgcataatatcaaacttctaaaaagttcctaggactcaataggcatttaataaacacctatcagataaatgaattttttaagagaacacattacataatgctttctaatagcaatacagtgacaaactttatttttaagtaaattaatgcaaatatgtatattatttaaaattgtttgtttttaagataacaagcctgatagataataaattttggcataaatatgttaatgcttatcaaaactcatcagtacatatcctgtcttttgatgaaaaagtaatagaaaggggagaacaaagagaactctcatgctcactaggcaggccgagtgcagctctgacagcaatgcaagagaaatattactatctccatcatatgcaggatgaaatttaggcttggagaaaacaacacttngttaaagattttatagctgctcaagatttgaccaaggcttttaaaacttcaaatgntcttttccttattacactgtttcttatcaggatttgtggactttggaaagtaaaatgaaaagtcagagcaatgtgagttagtttgataatctcagtggccagtaacagctatccccactctgaatatataccaaccaacctctcccctttctccaaggaagttagttcttggcaaaggcatttcatgcagtgtactttgtcattctaaccttcctttttttttgtatgctcctgttgctaatcatcctatttctatgggcttcagtcactcttttagcttttgtcttgggagactttctgtctgttgacatgacttttaaaataatcttctcccccattgtatttatatctcattagcctaccccccctccccttgtgttttagaagagttttattgtctgtcatccctctatanttcccaccctgttacctgcccgtgtcctgttcaaacacttgctccttttttccttgggcaggtgaaaggaaagctagggactgcacngtcaatggggatgaaccagactgcgtgccctgccaagaagggaaggagtacacagacaaagcccatttttcttccaaatgcagaagatgtagattgtgtgatgaaggacatggtaagagtcttaaaatgcaattgaaagaggccaatcttggaatttcatgtagaaccatttataagacaatttgaaattggggcctactgtggtgctatgttgacacacaggaaagggaaggacaggtggctagggtaccgcagaaccaggtgccgagctaactactggtctagacctttatgagtaagtctaggcaattcttccagatataggagaatgagtaaatatgaaccctaggaacagggttcatcagctcaaatcaaaagctcagaaattattttttttctggccttgacttacgcttatataatggtgctcgttcatggccagaaaaattcagaagcctgcagatacaaggacacagaaatccaaaaggtaggtaggaatgctccccctttctttggggatttagtttgtcctgataattccatctggggacctgaattttcatggatatctcaatgtattctaaggacccagattgaagtataacagaagtgtttctagttttgtttgacatgaagaaacctctggacataaagcttttcccatccctattcagcctataaagcaatgtttctcatccctggcagtgcattagaattgcttagggagctactaaaaatgtttcatgtttaggtcccatctcagggcaattacatcagagtctctgagtgaggaccttggtattggcctgatggagtaagtctggggtagagcctaacattctacatttttaacaagctcccaggtgatgctcatgctgccagtccccaggtcaccctttgagtgttaaggctagagactagaggaacaggggagacgtctaagtattggtgaggtttgtcttggttgctgctaaatgattgctggccatttcaacctggggtttcctgttctgtgtttaaacactgactgtattactggtgtcatgctgtgactgttgatataagcagtggatctcaaaaatccatgcagctcctgcccaccattttcatagtctgcttataattagccgctataactaatagtttccaaactgattttctaggcttagaagtggaaataaactgcacccggacccagaataccaagtgcagatgtaaaccaaactttttttgtaactctactgtatgtgaacactgtgacccttgcaccaagtaagttttagtctttctctgattaaaacactagatataacatgagagttatcattttcctagggaagtancactgactgagagttaagaattagggttctagtcctgctttgcctccaagcaactagatgactgtttgctcatttaaacactggtgaacttcctgtgtaggtgacactttgctggccacttaagctaaagatatgagccngacatatgcctggcatcaaggtatcagtccagaagcacagacagtcaaggaaagcaatggttattgtgtttcaacagcatgagaatancatcagaagagacttatgttccaggtgttacaaattatacagaaaaacttttcaactctgcctgaggagatggaggtgaagacatgaatgtgtctcatgacttgaatcttgaagaaagaaaagaaagagcattaacaggtgcacatggatggaatgcacattataggcagggaaacagcagctgcaaagagacaaaggaagctcaggaaaacagaatacctggctggagtgtaggaaagactgagaagcgttcagggctgaatcatgaagggccttgtcttttaggctaaagaggttggttttgacccaaagttagagaacctgccttgtaagtcatcttgggaagcttttaggagttcatctaataggcttaagaaataagcacatgatgccttatgttttatttgctaggaaaattttatgtacagttgtcccaggctctcccctggccacaagtgtctgagagtgcccctatgatgacaggctaggtaggcattggggaagcagctgacttagtaaaataataacaataatagtaattccaaatatttcataatcttgatttaattttcttgtcatcataaccttttgaaatagataatattatttccatgttattgatgagataaaaggctcatggcagtgtgacttcccaagctcacctagtcaggtaatgggcagaggctgtgaactcagacaacctgattgtgaatgtttgtctgtctgaaggaaatcacacatgaacctcttgagtctcctgatcaccaccggttgctaaaagtggcagcctctaagggccagctgagtaccctccctgagctacatcatgggcgtggctatcacctggccattttcttggtctataggaattttttgaaattacttttgacagtttattttaagagctagtttaagctataggatttacgtgttcagtttattacnaggtttaagtttatttttgtatccacttcatctctcttgtgtgtcactattttcctatcttcctttaactcttgaaatcttaagacagagtcattccttatgatatttttcatccagccatccaaattatattaacttgtgccagctttagatactaatttagaaatatttgaaggaatacgtttgccagagatgcaaagatgaataaaatggcccctaatttacaaagtgccattgaaaattataaaggaattattctgccaggcttttgaatttctcctgtatttttttttctagatgtgaacatggaatcatcaaggaatgcacactcaccagcaacaccaagtgcaaagaggaaggtaattatttttttacggttatattctcctttcccccaaccccatggaaagatgtgaagaaaaaccaatcactcttgattactagaaagtcctttatttaatcttaaagattgcttattttcatataaaatgtccaatgttccaacctacaggatccagatctaacttggggtggctttgtcttcttcttttgccaattccactaattgtttggggtaagttcttgctttgttcaaactgcagattgaaataacttgggaagtagttcacaaagatttgcctcattcttacctataaaaagctaccactttggtagatttatgtattgttaatttcttgcccctgaatgcagccttgagagctgactgataagaacaaatgaaattattcctcagctagtttctgagcaacagttttggggcattgagtggtattctcatccttcctatgaacaggtgttctctgcagcagcagaattggccaaaaatcagaagnaattcttcactattcattgagatctccctatgcaaaaagagaacacaagaagcaaaggcattcccaggaaacacattgcagggaacactttaaaaacttgtacttcactgcctcctcttcctcggcctaattgcttgtttttaattatttctccttcttaacttaaaatactatggggacacatgttatacaaaggtgacttagtagagtcagtagaaaagccaaaattagatattatcataattagtctagaaaaatccctttaagtcattcatcaactacagggtcacaccaactttcagtaacttagaagtattcaattttcccttctcagaacaattatctgtttcttcagttcagttgaagaagaaagtttgccttgcctttagcggttgtttagctgaaaatacatttgggatatttaagcactgtaattgtgctcagagacatacagattcttctatctcacattgactttaatgcatacacctattgagtatgtatgcttgagttatttgtgtgtgtatttcatttctgggcatccatagcaagttgatgttgacttgcttgtcctacggcttctgcatcctgccatagtcttgccgtccacatctttgctggacagagagtggtgcttgccatatggtaagtcaaaagccatctccttgctaggccagcctgtggtaattagatgactaattaagatatgtcctttcactagaacacttgacttagtagtacgaaagttccaaaatcagcngtctcctgcgatgtttggccacttttaagtttcactgaatttctcctttttccttcttatatttctcttagtgtgaaagtatgttctcacatgcattctacaaggctgagacctgagttgataaaatttctttgttctttcagtgaagagaaaggaagtacagaaaacatgcagaaagcacagaaaggaaaaccaaggttctcatgaatctccaacnttaaatcctgtaggtattgaaataggtatcagctttccttgaaaagaaaaatagagaaattagtgatttggctttttgttacttccttttacttttttgtttcttgtttgtttcattttgtttgagatggagtcttgctccatagcccaggctggagtgcaggggtgcaatcatggctcactgcagcctcaaagtcctgggctcaagtgatcctcctgcctcaactgtgaccctgggactacaggcatgcaccaccatgccaggttaattttttatttttattttttatagagacagggttcactttgttgcccaggctggtctcaaacttttgacctcaagcaatccttctgcctcagcctcccaaagttctgggattataggtgtgagccatcacatccggcctgttactttctttatttaaacattgcttgtgtttgtgggtgcataggttaaaggggcctcacagatgaattatgatatggtacccaaattaaaagtaaacttgtacacaaaaaccgtaagaatcaacaaaggagggaattgagagtgtgctgaaaatgagctgaaaaaagaacttggccaacctccatgttccgtgttgttgttatccctgcagagaaacagcctttaccaggcatgggttcagtatccaagcctgagcaaagagattgctcttaaagtttgtcataagggcacagcttaactttctctggctgccggttgaccttatgtctcaccatatcttttcccaacatggtatcaatatatttcagatagcaagaaatacaccgagaaaagaaaccagttgcacttaatggaattattttcttatttggggccagggctcagtgggagttaggattctttaaattaatatggtaaaaaaaatttcaatttgagccattttctggtattaagaataagaatagttacagggaagaaaattttagagtagttatatttattatttattttaataagtctatatgaaaaataacctcaacctattttatgaattctttaggtttcttgcctttaaaaactaagacaatattgcttagtttctggcaaggccggaacctttcagaataaaaattgaatggtaaaagtaaccttcttaatcacttaatctagcttcctaattttatacatcaagcaactgattgtacttctttctgaattaaggaaaaattagaagttcacatttagaatattctaaagatatatttttatttgtctttctctgcttccattttttgctttctaggaaacagtggcaataaatttatctggtaaggcttttatcattttatttcatagagatggcatcctttagagtaataggccaatttcagagtaaaataatgttactaatttcagtgacatattatgggatcttgttatttctcatacaattctacctgctcagcataaagcatttatcaggcagtttgtttaaatttataatgantactcatagttaaaaataatcaagtaacaataagacacaatagtctgaggcttaagaaacttttccttcataatcagctagatgtattacagaactcctgcctaaaaagatctagaggttaaagtgtactgtagactcaggtattatcagtgtacccaactctataacaacatacatgattccattcagtngttctttgatctgtgatttagagataagatgatcataaactctttgcttatacttttagatttgtgggtcattgatcattggatccataagagatgttataggtgatcttttccaatcctcttaatttataaatgagaaaagaagatacagaaatgttatgtattgtggcccaggttatttaacaaattactgggtatatggcaggatttggagttagaactcaaggttgtcttgtttctgtattcccctagtcagctcttcatagacttttaggacttagctatattctgaagtactataaaaagagaaataaacatggttttcactaatgggaatttcatttagaaaaacaaattttcagactattttctatttttcagatgttgacttgagtaaatatatcaccactattgctggagtcatgacactaagtcaagttaaaggctttgttcgaaagaatggtgtcaatgaagccaaaatagatgagatcaagaatgacaatgtccaagacacagcagaacagaaagttcaactgcttcgtaattggcatcaacttcatggaaagaaagaagcgtatgacacattgattaaagatctcaaaaaagccaatctttgtactcttgcagagaaaattcagactatcatcctcaaggacattactagtgactcagaaaattcaaacttcagaaatgaaatccaaagcttggtctagagtgaaaaacaacaaattcagttctgagtatatgcaattagtgtttgaaaagattcttaatagctggctgtaaatactgcttggttttttactgggtacattttatcatttattagcgctgaagagccaacatatttgtagatttttaatatctcatgattctgcctccaaggatgtttaaaatctagttgggaaaacaaacttcatcaagagtaaatgcagtggcatgctaagtacccaaataggagtgtatgcagaggatgaaagattaagattatgctctggcatctaacatatgattctgtagtatgaatgtaatcagtgtatgttagtacaaatgtctatccacaggctaaccccactctatgaatcaatagaagaagctatgaccttttgctgaaatatcagttactgaacaggcaggccactttgcctctaaattacctctgataattctagagattttaccatatttctaaactttgtttataactctgagaagatcatatttatgtaaagtatatgtatttgagtgcagaatttaaataaggctctacctcaaagncctttgcacagtttattggtgtcatattatacaatatttcaattgtgaattcacatagaaaacattaaattataatgtttgactattatatatgtgtatgcattttactggctcaaaactacctacttctttctcaggcatcaaaagcattttgagcaggagagtattactagagctttgccacctctccatttttgccttggtgctcatcttaatggcctaatgcacccccaaacatggaaatatcaccaaaaaatacttaatagtccaccaaaaggcaagactgcccttagaaattctagcctggtttggagatactaactgctctcagagaaagtagctttgtgacatgtcatgaacccatgtttgcaatcaaagatgataaaatagattcttatttttcccccacccccgaaaatgttcaataatgtcccatgtaaaacctgctacaaatggcagcttatacatagcaatggtaaaatcatcatctggatttaggaattgctcttgtcatacccncaagtttctaagatttaagattctccttactactatcctacgtttaaatatctttgaaagtttgtattaaatgtgaattttaagaaataatatttatatttctgtaaatgtaaactgtgaagatagttataaactgaagcagatacctggaaccacctaaagaacttccatttatggaggatttttttgccccttgtgtttggaattataaaatataggtaaaagtacgtaattaaataatgtttttggtatttctggttttctcttttttggtaggggcttgctttttggttttgtcttccttttctctaactgatgctaaatataacttgtctttaatgcttcttggatcccttagaaggtacttcctttttaaccttaacccttttagtagttaaataattatttccataggttgctattgccaagaagacctcttccaaacagcacatgattattcgtcaaacagtttcgtattccagatactggaatgtggataagaaagtatacatttcaaggggtaggttttattattaagaaagccaaatgaggattttgaaatattctttcctgcatattatccattctagctacatgctggccagtgggccacctttcttttctgcaatttaatgctagtaatatattctatttaacccatgagtcccaaagtattagcatttcaacatgtaagcatgtcggtaagatagttgtgctttgcttagggttccctcctgtgttatggtctggaaagtgtctttaggcagaaagtctgagtgatcacagggttcnctcattaatttctcttttctgagccatcatagtctgtgctgtctgctctccagttttctatttctagacagaagtagggcaagttaggtactagttattcttcatggccagaagtgcaagttctactttgcaagacaagattaagttagagaacaccctattccactttggtgaactcagagcaagaactttgagttcctttgggaggaagacagtggagaagtctttgtacttggtgatgtggtttttttcctcatggcttcacctagtggccccaagcatgacttctcccatgtcaatgagcacagccacattcccgagttgaggtgaccccacggtccagaatcatcctcattctggtgaacctggttctctttgtggtgggcatactgggtaggagaatcacccaaaggtcacccatgagctgcagaaaaaaaggctatttgca

SEQ ID NO: 404 - DNA, 21 bp, Artificial Sequence
  Primer
catatcatcctccttatccct

SEQ ID NO: 405 - DNA, 20 bp, Artificial Sequence
  Primer
tggcatgatctccgctcact

SEQ ID NO: 406 - DNA, 24 bp, Artificial Sequence
  Primer
tctataaatgaaagtgaatcatgg

SEQ ID NO: 407 - DNA, 20 bp, Artificial Sequence
  Primer
gaaagtgaatcatgggctcc

SEQ ID NO: 408 - DNA, 25 bp, Artificial Sequence
  Primer
ggtttctatacctccactgtcttac

SEQ ID NO: 409 - DNA, 20 bp, Artificial Sequence
  Primer
tgcctggcatttagtaggtg

SEQ ID NO: 410 - DNA, 22 bp, Artificial Sequence
  Primer
gactatttgttcagccaatcag

SEQ ID NO: 411 - DNA, 20 bp, Artificial Sequence
  Primer
cgggaagtgcctcggagact

SEQ ID NO: 412 - DNA, 24 bp, Artificial Sequence
  Primer
cgcctaaaacagcctttgctaaga

SEQ ID NO: 413 - DNA, 19 bp, Artificial Sequence
  Primer
gacgcgctggtagagctgt

SEQ ID NO: 414 - DNA, 22 bp, Artificial Sequence
  Primer
ctgaagttgccctggttgattg

SEQ ID NO: 415 - DNA, 20 bp, Artificial Sequence
  Primer
tgagccaacgcccgcagaaa

SEQ ID NO: 416 - DNA, 19 bp, Artificial Sequence
  Primer
gcaagactccatctcaaca

SEQ ID NO: 417 - DNA, 20 bp, Artificial Sequence
  Primer
gactccatctcaacataaat

SEQ ID NO: 418 - DNA, 20 bp, Artificial Sequence
  Primer
acttgccctaaatctggttc

SEQ ID NO: 419 - DNA, 24 bp, Artificial Sequence
  Primer
ggtgaaaccctgtatctactaaat

SEQ ID NO: 420 - DNA, 20 bp, Artificial Sequence
  Primer
cgcaatgagccgagatcaca

SEQ ID NO: 421 - DNA, 20 bp, Artificial Sequence
  Primer
taactggatcggggaaatag

SEQ ID NO: 422 - DNA, 19 bp, Artificial Sequence
  Primer
gcccaagatgtggtaaagt

SEQ ID NO: 423 - DNA, 20 bp, Artificial Sequence
  Primer
accggtaggtggaacacaag

SEQ ID NO: 424 - DNA, 23 bp, Artificial Sequence
  Primer
tagcatatcctcaaatgaatctg

SEQ ID NO: 425 - DNA, 20 bp, Artificial Sequence
  Primer
aatgaatctggcctttgaac

SEQ ID NO: 426 - DNA, 22 bp, Artificial Sequence
  Primer
ttttgctgcttacataagtgtg

SEQ ID NO: 427 - DNA, 20 bp, Artificial Sequence
  Primer
tgctaccttgccagtgctgt

SEQ ID NO: 428 - DNA, 19 bp, Artificial Sequence
  Primer
ccagaaatgccgaagtaac

SEQ ID NO: 429 - DNA, 20 bp, Artificial Sequence
  Primer
gccgaagtaacttaagaatt

SEQ ID NO: 430 - DNA, 19 bp, Artificial Sequence
  Primer
actacccaaatgcatgtca

SEQ ID NO: 431 - DNA, 20 bp, Artificial Sequence
  Primer
cttttgggagacacaactgg

SEQ ID NO: 432 - DNA, 24 bp, Artificial Sequence
  Primer
ttctactctctcacatccctatct

SEQ ID NO: 433 - DNA, 20 bp, Artificial Sequence
  Primer
catccctatcttgcttcatc

SEQ ID NO: 434 - DNA, 22 bp, Artificial Sequence
  Primer
gagatttggagcaagcattaac

SEQ ID NO: 435 - DNA, 20 bp, Artificial Sequence
  Primer
tgttagggcacacggaagtt

SEQ ID NO: 436 - DNA, 19 bp, Artificial Sequence
  Primer
aggtgggcagagctgtact

SEQ ID NO: 437 - DNA, 20 bp, Artificial Sequence
  Primer
atgagtacacgtggcaccag

SEQ ID NO: 438 - DNA, 20 bp, Artificial Sequence
  Primer
catagggctagtacagaagg

SEQ ID NO: 439 - DNA, 18 bp, Artificial Sequence
  Primer
tcccactgtagaagtccg

SEQ ID NO: 440 - DNA, 20 bp, Artificial Sequence
  Primer
gtagaagtccgctgaaaact

SEQ ID NO: 441 - DNA, 23 bp, Artificial Sequence
  Primer
gacagatctcctcattcaataat

SEQ ID NO: 442 - DNA, 20 bp, Artificial Sequence
  Primer
accacagtcagcctgaggat

SEQ ID NO: 443 - DNA, 24 bp, Artificial Sequence
  Primer
aatcaaatcttactataaacatgc

SEQ ID NO: 444 - DNA, 20 bp, Artificial Sequence
  Primer
cccacacagtcccgtgctta

SEQ ID NO: 445 - DNA, 20 bp, Artificial Sequence
  Primer
tcccgtgcttaccatgttgt

SEQ ID NO: 446 - DNA, 22 bp, Artificial Sequence
  Primer
cccagtagctgtttgtgaaccc

SEQ ID NO: 447 - DNA, 20 bp, Artificial Sequence
  Primer
taacacagtgtgccccacca

SEQ ID NO: 448 - DNA, 24 bp, Artificial Sequence
  Primer
caggagcaactgttgatctagtat

SEQ ID NO: 449 - DNA, 20 bp, Artificial Sequence
  Primer
gctgctttcttgtgtcaggt

SEQ ID NO: 450 - DNA, 23 bp, Artificial Sequence
  Primer
caggctatgttcgtgattactct

SEQ ID NO: 451 - DNA, 20 bp, Artificial Sequence
  Primer
caaagagaggaggcccagtc

SEQ ID NO: 452 - DNA, 19 bp, Artificial Sequence
  Primer
gaagtaggagggcatgacc

SEQ ID NO: 453 - DNA, 19 bp, Artificial Sequence
  Primer
cacagctagtggcgattat

SEQ ID NO: 454 - DNA, 20 bp, Artificial Sequence
  Primer
aggacatgcttgtgccgact

SEQ ID NO: 455 - DNA, 22 bp, Artificial Sequence
  Primer
actgggcatcttcaaagttatc

SEQ ID NO: 456 - DNA, 20 bp, Artificial Sequence
  Primer
aaacaaaagacctgggaaag

SEQ ID NO: 457 - DNA, 24 bp, Artificial Sequence
  Primer
accaccaagtcaatgattatgtca

SEQ ID NO: 458 - DNA, 20 bp, Artificial Sequence
  Primer
acttgtttttctttcccagg

SEQ ID NO: 459 - DNA, 23 bp, Artificial Sequence
  Primer
gtatagtctccacagggatttgc

SEQ ID NO: 460 - DNA, 20 bp, Artificial Sequence
  Primer
tttgaagacgccggaaaact

SEQ ID NO: 461 - DNA, 24 bp, Artificial Sequence
  Primer
tgccagtaataaggatgctaacaa

SEQ ID NO: 462 - DNA, 20 bp, Artificial Sequence
  Primer
tcaaacctaactgtgacagc

SEQ ID NO: 463 - DNA, 20 bp, Artificial Sequence
  Primer
tgcccatgagaagtgtcctt

SEQ ID NO: 464 - DNA, 19 bp, Artificial Sequence
  Primer
aaagggaagaaccggatga

SEQ ID NO: 465 - DNA, 20 bp, Artificial Sequence
  Primer
gaagaaccggatgactgtta

SEQ ID NO: 466 - DNA, 20 bp, Artificial Sequence
  Primer
ccggacagtattgtaaggaa

SEQ ID NO: 467 - DNA, 40178 bp, Homo sapiens
tgtatctaagaagcaactaacttgcttttgattttaccagctaataggtggaagggacttgccttgtctcaggtgagactttggactatggacttttgagttaatgctgaaatgagttaagactttgggggactactgggaaggcatgattggttttgaaatgtgaggacatgagatttgggagtggccaagggcagaatgatatggtttggctgtgtccccacccaaatctcatcttgaattatagctcctgtaattcccacatgttgtgggagggacccggtgggagataactgaatcatgggggcagtctagcccatactgttcttgtggtggtaaataagtctcacaaggtctgatggttttataagaggaaaatccttttacttggttctttctctcacatgtgccgccatgtaagacaagccttttgccttctgccatgattgtgaggcctccccagtcctgtgaaactgtgagtcagttaaacctttttccttcataaattacccagtcttgggtatgtctttattagcagcatgagaacagactaatacaccttctaattagtctccctgcttctgtagttcagaatgatctttctaaactagattatgctgcccttctattgaaaatattacactggcttctcatcttactcagaagacacggtaagatcttgacaagtggctcccaaggcaccagacttctaggacttcatgttctattactttctactatgtacattctgttttagcctcaaagacctcaccactctggctaggacccaccaggaatattcctaccacagggcctttgtacctgctattttcacccagaatgtgctttctccagtatctaaggctgttaactacctccttgcctgtgctcaggtgtcacttcataagagtcctttcctgattaccatatacatatcatcctccttatccctgtttttttttttttttgggggatggagtctcactctgttgtccatgctggagtgcagtggcatgatctccgctcactgcaacctccacctacctggttcaagccattttcctgcctcagcctcccaaggagctgggattagaggcacacaccaccacacccgctaattttgtatttttagtagagatggggtttcaccaagttggccaggctggtcctgaactcctgtcctcaggtgatccgccctcctcagcttcccaaactgctgggattacaggcgtgagccactgtgcccagccccttgttgtttgttgttgttgttgtttgtttgtttttgttgttatttatagcacttatcaccacctcatgtattatatagttattcatgatgtgtctcttcccatcagaatatatacaagagaacaggaaccttgtttggttggtttctatacctccactgtcttactaatgcctggcatttagtaggtgctcaataaaatctttgttttagaaaatgattaataaataatatgtacatattgaatattgtttcctcttttaacaaatctttaataataataaaaaatttaaagcagcaagattgctttgcatcaggcacaatgataagcgctttaaatggagcccatgattcactttcatttatagagcccacatgctctctgtcaggcgcagaaggtgccagccctgcaggagcttcgggggcggagcagaaggccgcctaaaacagcctttgctaagagagcatgcgtaggcgacgcgctggtagagctgtggacctgccagcctgcgaggcggaggacgggctccatctcttagaaacgcctacggcgcatgctctatggggtcaactggggggctggcaagcggcagcgctggtctggggcggagtctccgaggcacttcccggtggctggctgctctgattggctgaacaaatagtccgagggtggtgggcatccgccctcccgacaaggcagaccaggccccctgcaggtcccctatccgcaccccggcccctgagagctggcactgcgactcgagacagcggcccggcaggacagctccaggtgagagtgccggcgccgcggcgctgccaggtgcgggtgcggcgtggaagctggtgccttcagcaaggggagggtcgcgccccgaggctctgccggccggcaagaccctctgcgtttggacccagcgagtcttgcctggggtgcctgcgggtgctttttctgcgggcgttggctcaaggcatctgccaatcaaccagggcaacttcagagagcaacttcagagagaagcccactctcttccctgggcgctgtccactttcctggacaggcgcggtctccggtcagtgaagctgcccagtgctcctggaccgcgaggacagcagggatgtctgattcctctctctgcatcctcgtgctctccccttagctcctccaggcatcccatcctacctctcttgttagccaacggcgtggtcgaaagcagacttgggcatcaatcctggttaaagtcccagcgatactgctttttaaacagctgacactttgcttccagtacttcagctgggtgaacctcagattcctgaaaaatggaattaatggtactgccatagggtcggtggaggagtaattgacagtagatcagaagcgctgcctgcggtggctggcgcctcgcaagagcttaaatgggagtcgtaataattgttgttattagaaagttaaatagcatgctgcgttggggccttttcttctgccactgaactgttggactgctcttatcttttttcagaatctgtactatgcatctaatatatacgtggcactttgcttggtcctgggggtacaaagctgagtcagattgttacaaagtctaaataactgagataaaggtgttaatacagcccagaaaagcacacttaattcagcctggaaggttttttttcccccctccttcgagattttcagagtatctccttcttagtaagaattgcttggcttagtatgttgagaaaaacatactaagtatgtagtgttgtgttggaaggaaaacttaactgggtgagattttcagctgagtagctttagctgttactctcatggaccttcctctgggcggttgatacaggttctgtaggaaaaccgctgaatgaaagcagctcctgcagatgctattctgttttcaattgtggtaattcctttaattttttccctttcaatttactccttattctctagtaataatggacttttgggaggttgcatttatgataaaaaatagcctggggctgtacaatccttcctatcatgaagaagtacaaagttgtaagtagaagcagtggccttgctttgccaatgcacactgaaggggataacgtttgctcctgttcagagttcacggtcgggcgcggtggctcacgcctgtaatcctagcacttttggaggccgaggccggcggatcacgaggtcaggagatcgagaccatcctggctaacacggtgaaaccctgtttctactaaaaatacaaaaacaaaattagccaggcgtggtggtgggcgcctgtagtcccagctacttgggaggctgaggcgggagaatggcctgaacccaggaggtggagcttgcagtgagccaagatctcgccactgtactccagcctgggggacagagcaagactgtctcaaaaaaaaaaaagaaagaaaagaaaagaaaaagaaaaagaaaaaagaaaaaagaaaagaatttcagagttcactacttcttggaaaaaaataatcccaggaggaattccatcaacagaagggagtcagttcacttttgcaatctcctgagaatcaatttcttaagacttgtggaatattcagtttaaacacaaaactaaaaacaaacagctgtattggagtattattgacatacaatagcatggcatatttcaattgtacaattgtataagtttttgcatgtgtacacacctgtgaaaccatcagtacattcaatattatgaacctgtacatcacctccaaaatattatttgtgcatacccctttgtgatcctttcttactgccccttctctccaggaaaccactgatctgctttctgtgaatatagattagactgcattttgtggagttttatatgaatgggatcagacagtacttttttttttccttattttgatctggcttcttttggcataattattttgagattaatctatatttttttgtgttccttcccttttatagctgagtagtaggtatataccataatttatccaatcatccatttaaagcatttgggtttttccagtttttgtctattacacccaaagctgttataaacatttatgtacaagtctttgtatgggcatacatgcctgcatctttttaagtgattctatttattttttaaaaatgtagaagttctgggatctagtcctaggtttttctctgaccacttgcgtgatcttaggagaggcatttaactttgccttcagcatcctcaaggtctttgctgtgattttgagtcatcactgccagaaaccaagatggtctttgttgatttgatggttagagaatttcagaaggagagagacgggtcaaatttttcctttctgtttcttttgaaagctctattttctttcatttcacttttttcccatgaatgacaaatttaaatgctgacgtataatttggggcaagaacagaagtggttagataagtaggaggaagagctaatagtggttagataagtaggaggaagagctaatagtggctgaacttaaacatgtctaaatcataggtggaaggcaagaggtgggaaataagcaagctcagaaattttgtgtctctttctttttctcaaactatcctcttctaagtcttgccttttgttatttctccatgaccaatttgtttttaactttggggttaggaggtgaatgggtatgctggactccaaaggtcatatatcaactggaggtggtgggtgggaggtttcttagttaaaagtaattcctttgggccgggcgcggtggctcacgcctgtcatcccagcactttgggaggccgaggcgtgatcacgaggttaggagatcgagaccatcctggctaacacagtgaaaccccgtctctactaaaaaaaaaaaaatacaaaaaaatttgccgggcgtggtggcgggcgcctgtagtcccagctacctgggagtctgaggcaggagaatggcctgaacctgggaggcggagcttgcagtgagccaagattgcgccactgcactccagcctgggcgacagagcgagactcagcctcaaaataaataaataaataaataaataaataaataaataaataaataaatataaaataataataataataattcctttgggaggcggaggcgggcaggtcacgaagtcatctgagaccagccttgccaatatagtgaaaccctgtctctactaaaaatacaaaaattagccgggcatggtggcctgcacctgtagtcccagctactctggaggctgaggcaggagaaccgcttgaacctgggaggcggaggttgtggtgagccgagattgtgccactgcactccagcctgggcaacagagcgagactccgaaaaaaaaaaaaaattcctgggcaggcgcggtggctcacgcctgtaatcccagcactttgagaggccgaggtgggcgaatcacgaagccaggagttcgagaccagcctagccaatatggtgaaagcccatcgctacaaaaatacaaaaattagccaggcgtggtggtgcgtgcctgttgtcccagctacttgggaggctgaggcagaagaattgcttgaaccaggaggcagaggttgcagtgagctgagattgcaccactgcactccagcctgggtgacagagcaagactccatctcaacataaataaataaataaataaataaataaataaataaaataaaaataaataaataaaatttaaaaattccttattctcctttcagatatggctggagtcatttgtttcatattttcctttcaccttttacttgccctaaatctggttcagaactttttgtgggagcattaagttaccagaatatttttgtgtagtaaaattcaagcaaataataatagactgttttattatacagaatgaaaatgcggttcttggggttggtggtctgtttggttctctggaccctgcattctgaggggtctggagggaaactgacagctgtggatcctgaaacaaacatgaatgtggtaagtttctcaaagttatgtacttttaaaatgcatctatttccccgatccagttatgtgagctacatgaagccatacccatacattcatctctttataactcctttgcttttcaatttctctgaattttttttttttttttttttttttttttttttgaggcagagtcttactctgtcacctgcccgcccaggctggagtgcagtggtgtgatctcggctcattgcgacctccgcctcaggggctcaagtgattctcgagcctcagcctcccaagtagctgggactacaggcatgcaccaccatgcctggctaattttttttgtatttagtagatacagggtttcaccatgttgcccagggtggtcttgaactcctgagctcaggtgatctgtccacctcagcctcccaaagtcctgggattacaggcgtgagccaccgtgcccagcccaatttctctgaatcttagattcaatttgctaggcttttctcaccaggtaatatgtagccaacaaacctcagtttaatgttatatatacttcttaataagataaattatgattttttattaattcatttcatttttaagtctcactaagtttgtttaaactataaaaaagtatttaaactttgcaagaacattaccgctattgagagctggttttagaatacattgaacaaaggttgtgattaagaatgtccagggaacatatttctatacagaagtcaaagtatctgagctaaattttgttagaaaaaatatgcaaaaataaccactcgactaattaaaacatctgaaagttattaatcgtaagtaaacaataaaatctggaaatacctcatttaggcacaaaatatcagtaaagtacaaattattaaagaaaacagcaactttaaaatagatgttgcagtgacccagctgaagaatcaggcaagcttagggactcgcagagaaattcacagtgagccaggagagtatgacctgataacagggtcttaaagttaagttttacttcttagctcaaagcttttcttttgcctcccaatttttccaacttttaaaataattttttaaataagaatgataaaattaaattctttcaagtacttatggtagagagggtatgtgcacttatttacattaaatcccctggataattgaattatccatatcccactgagctcctgattaacaattgtcccatgaatccttccttatagaaaagtgaatgtgaccataattccctattttgttcaacttttcttccatcccaccttgacattctatgtaattattttagtccattgataaaaacaagttaatattttttatactttattggccagcaggggatctctcaaaacaaagaaagtgttttatacattgacagttctagctgggatatttagaaaagaaagaaatgagcatttatttgtgcccggtaggcaggatggaaacaaagaggcccaagatgtggtaaagttaggcaaatttggtataaaacatgctagaatgatgaaactgaagtttaaccagacaccggtaggtggaacacaagcgtgaaacaagggaggatttactcttgtgatgagaagttggctactagatttagcagactaaaatttcaatgacaaatgctttcttaaagcctggagaacatagtttatctgctcctttgcttgttaatgtgggagactgtttcagattctgtccacccaatttccatcgtcctttttctctacagagtgaaattatctcttactggggattccctagtgaggaatacctagttgagacagaagatggatatattctgtgccttaaccgaattcctcatgggaggaagaaccattctgacaaaggtatgggaaggctcttaaaagtaaaaaccagaattcttctgggttttgtgttagtaaccaagttcagatttaacttaaaaacattgaaatgggattatttttagacgaaagcactaactgtgttgaggtttgcaaggcaaagaaaaataattttcttttaaagaagtaaggacaagagtcatctaattttttgttcaaaggccagattcatttgaggatatgctaaaatctctgaggctttgtttttttaaggaagtgtatttaatgaaatgttttgagcattaaatagatggcttttgctatttaaaaattatttaatttttttgaattcacataatctaaaaatcagagaattagaagacatacagtgaaatgcctcccttctctctcactccctacttcctgcttttttgtgtatctttttgaaataacttcattttaaaatctttttatttccaaaaatctcattagaaacaaatacacacacagattcttatttttcccttgcctccatttgaatgcaaaagatggcactattttgttctttgaattttttacttaatatcttggagatctttccatacaatacataaagcacatcttccagaagtgcatgatatttcactatatgactgtatcattatttatttaccaagtgtcctattaatgcatatttgtgctatttcagtcttctgttaacaaatattgctgctgtaaataagcttttgtgtgtgcaagtttatttacatgatacatgtccagaagtagaatttttggatcacaggatatatgcatttgtgattttgatatatattgccaagctgattttcatgtgcatgtgtcctgataattactatcactatgaatatatgaaagttcttgtagctttggcttaaaaagtatatatatacatatatatgtatatcttttttctctctctcattttataactcaagcaaaactgcagtttccagtgcagataaaggaatttctagacagactgattgaaattattaagcagttatcagaagaaggatctaatctttattcaattatctctccagatgtagcttatttatttatttatttttttgagacggattttcggtcttgttgcccaggctggaatgcaatggtgcaatcttggctcactgcaacctccgcctcccaggttcaagtaagatgtagcttattctctaacatttttttgtttctggagacttttcttggggaaattaaggtttagattaaggtagttagatagctatttattcttcaatttaagtgttatacgggcaaaagagccacctttgcctcaattcctgcccaaattgttattcaaagcaaacttaaacaccctttgtgttaatgtgagcattgtattattatttgctttgttttttcttaatttatcctagtttaacttttttcttccatgtgttctagctgtaataagattttaataatgtttaggtggccacgacaaccattttttttgaaatttgatttctaactcttgagatttttatgctttacagatatatgccattaagcttcctttttataaatatgttataaaatgagtgatgagttatagtgagagcttttagtttttcctgtgctcaaaacactcaaaacatatattttatgctagagcgagcatatgatcttggtttccttccttttttttcccccaaagaataacccctgtatactgatttcagacactgtataaagaaaaatgctttatattatttttcttaaaattatagttgattaattagtaacgtgaatcactgttaaatgatggtaagcatctcagtaaaacttgctgagagctctcctcctatatccagcttcagacttctctctccatacagtggttaaaacactcagagtcacatgccctacctgtgtgtatcacactgttgcaggggaaggtgcagtgccctggaatatgaagaaagtgagcatgagtcttgatatgctcccaggtaatagaaaggagacttatgggaccttggtgctacacctgggtttgcccctgacttcttgtgtgctttgttttttcttttttttttttaacctctgtgggatatattatatatactttattttatttttggcaagagggttggggattgggagagtggagagtctaggtctttagaatgggggaatatagactgaaagtatttactctaagctaaatctgttcatagcatttggtcctcatgttctttctctattctgagaggccctccctgtaggggatcactgatgtgtatgtcatacctgctatgagctaacctcagtggggagtcttcaaggaagtctacagtgaacaactcagttctctaaaggaattgtgattttcctaagaactgcataggcgctttcctgatggtttgcatttccacattctaaaacagagcatggacagaggctctttactgtccttcactcctattcaagagcaaggttgttgccactggtgttatttccggtgtttaaaggcaaatagataaaaagaatggagaaggcctttcacacccaaagtgaaacgcgtcctcttctcatgcatcccgcttcccctcctgacttcctcctctattattaatagcaccagcatcctcctaatgacctagcctggaatctgcagaatcattcttgaccacgggtcctctctaggccacccacgttaaattgcttcagttcatctttttcttctgtttccctgaccaccagcctacattaggctcttgttaccacttaactgggcgcctgaaataagctcagcagctgagagagtcttgagccatttccattttcaaggctcctcgtatactaacagaaagaaagaatttcaagacaggattatggaaattcagtttgcttatatagtttaagaaattaatgcttttaatacacacaaaaatactgctatacattcatactatttacaagtaattacaaaatgtattaaaacattattcattttttggtaccacattccttgtggaacctgagtctacagctgaatggtgagcatctttcagtcctgttgccatgggcctctttgactgactgtgtagcctcacttggagatcaggttttttttatgaacacagggcttggccacatggcttctctgctcatgtttgcttaaaggctttacctaactgctcttttctctgccaggcttcctgttctcattcatcctatgtggttttgcaggattaagtttcttaaagcttagctataatgatgtgaaattgccattcagcaatctttaggggtctcagaaatgaagatacacactgttccttaaatattctgtccagctggtatttgtacctttcacctccattctgcacagtagtagcccttggctactcgtgcagtatgtgcatgctgtttcccaccattaagcaaccttcttaggaagtgttgagcaatgctttgctcctgaagggaattgaaattcagaaattacacttcatagggaagtggctctgttttcatctgctcagccttatttcagaaagtcatggggagttagcactggagggatctcagattcctgcctgggctagggatttttgtttttttttaaacacacttcactggtggattccaaggtagaattcttggttttggcaacctgtgttctagactaacatcctcattttgttggataagacagccaggttcaaatagggaaatgaatttgtctcagggcagagggtcatgtcctgacctgtctgactacagattcagtgatctttgaactggagaatgtggccttacataataaatattaaccaagttgatgccatgataggcacaatatatattttatatatatatacacacaccaagagtggcacatttgtatctgaaagttatgcatctgattgccgagtgggtgaagtggcactctagactgtgaaagcctggaatgactgccttcagcatgcagaaacaggcttttcaactgtggcctcagcaaagattccccaggggttgtccattgagctattagagtcatagctgaaaattcacagcgtggcttgtgagttaagtctttagaaggagaccatcagcttgtattttgctttgattgtttattttagaattctggttgatttctagatttttctttccttatagaaaaatccttcacttctaaagaaactattttttgaatcactgcagtgctctaacgggctacacataggcgttggtaatctgggatgtaattcctcacccctggtggtgccgaacagacatggtttcattaatcaatgcctgagcttggtgacttgggctgagctcaggctcatgtagcactctgatggcgcattgggtaggggattgcattcagaacctttgcctaatggagcagcataagtgaggtcagctgtacagcttatctcatagacccaggttgggatcagagcagaaagccaagtggaaaggaagatagtgctctgccctgtccccttccctcctcttcctcctggttaaccgctctgacctgtcctctgttctcaacctaattttcacatcttcagggaggatttcctcagcctctcacaccaggtcaggcccctggctacatattcttatagtcctctgtgtttttctccatcgcaattaagacaataaacaatatattattatgtaggtgatgatgtgtgtgacctctgtcatccccaccagactctgcggggatgaagacttttctgattctctttacttggtaaattgctttagctccaggctgcagtctacccaagcatgctcctgcagccctcctgtgacattgcgatttaatagtgtcccctgctcaagggcacactgcatgaaggatttcctactcctgggctcctaggagtccacgaacacaacttaaatgcttcctgtggtgggtaaaacttgaagctgtattgcctcatgattaagctgagcatgtgaagagccaccagtcatgggtgtaagttctggctctactatttaactggctgtgtgaccttggcaattttctttacctcttgaagttttgacttattcaattattaaacaggaagaataatactggctacttcgtaggctgttgtgaaaatttgataaggcctgtgaaatatatgcagtatagtaagtgcaggtgatacaatttcttttacaacatttatttatttaaaatattaatgaataaatacataaatattttaaaagtctcaccgtgtctcccaggctagaatgcagtggtacaatcatagcttactacagcttcaaatgatcctccctcagcctcccaaagggctgggataacaggcatgaaccatggtgcccagcctctgtttttaattttgaaatgtcaacatggatttgatggtggtctctgatattgacttcttcaggattaagccctccatgacagggatgtattctaaactgtgtggacaggaggaagatgcatttgtttacaatggacagaagtaagaaaagtaagaaatgtcatagaactatgtctgggggtcaggtgacaagcactgtgtcatttctagccctgtgtcccctgcaggtgctttcttctgtggaccctctgctccttctgttgagggagaattttggatgagagctggataatttcccaaaattcgctcaactgtgaagctctggaactcaagttgctgtgctgcaaagctgtctgaggacaggccgtggtggcagagaggggcagggaagacaggcaatttggcatggagatgatgggcacatttgtcacatgacctgggtttgattcccagctgcatcgtatactaattgtgtgtcctagggcaaatgatttagtctctctaagcctcagaggccccaaaggaggaagaatgatgtaaatggcccagcaccatcctgggtgcgtggaaaactctaattatgataatgtcctggaacgttctgcagtgaacaagacagaccacattactgccttcgtgttgcctggtgatcagagtgattattgctggttttggggaaaacagcattctgaggcatggaacggttttcttccctgctctgtgatgcagggtgctcttgttgtgttcactcctgcaggtcacctgctccccagcagggtgacagtgaagtgtgagtgcagtggactgcacagtggcaaaggccacatgactcctgaatgcatcctgtggacaggccaagcgctgtgccctgtgtgaatcatcaggtgaactctcatacaattctagggtgtaagaactcctattacctcctgttttacagatgaggaaaccaaggtttatagggttaattaacttgcccaagataaagcagctgatgggtagtgaaggcaggagtcacacagcccgtgactgtttctgcccacttggccctcttctcaggctagagaacagctatgatgtccctgataaagtcacactgtggaaagtggaaagtatctgacttagatgtcctgcatctgctagatgtcctgcttgtgcctactacagcaactcagagagctgttaggtgacttatctgagataatgcgtgtaaagtgcttaagtgcttagcatggtgcctgtcacattgtcaacacttagtatgcgcttgctgttactatgattatattacctgggccaaagaatgccacttcactctatccttcttcatagtggttatgttctaataatattttattacatttacagttaactctttaacaacatgggggttaggggtgctgtcccccagagttattgaaaactgcatataacttttgcattccccaaaatttaactaatagcctactgttgaccagagggcttacctgtaacgtacatagccaattaacaaatattttatatgttatatgtattatattccatatatacaataagtaagctagagaaaagaaaatgttataaggaaatcataaggaaaataggatgtatttactattcattaagtggaagtggatcatcataaaggtcttcattcttatgttggaacaggctaaggaagaggaggaagaggaggagttggtcttgctgttgtaggagtagcagaggtggaagagggggaggaagtggaaggggagacaggagaagtgggcacattcagggtaactttatgaaaatacattgtaatttctgtccttttttcatttccctagaaatgtttctatagaatagcaattcttccatcatttgctttagtttcagtgcctgtgtcatagaagcgtcagtgttgtaaaggaagtcttgaataattgcaattgccacccttctcctgaattgtctaatatcagtttgttttctagcactgcatctcccatgtcttctttcccatcgtctggtgctgttttagaagcactcgtctccatcaaatcatcttctgttaattcctctggtgtgtctattagctcttgactttatttaagatgcatatattgaaactatttacctgctcccaccctccacctttttgccatatccacaatctttttcttgatttccttgattggctaagtcatggatatggatactgtgaagtcatgcacaacatctggatacacttttctccagcaggaatttattgtttcaggcttgataactttcacagctttttctgtaacaacaatggcatcttcagtggtgtaattcttccagaccttcatgatgttctctctgttggggttctcttccaattcaatcctttccatagtgtatgtgtgtaatgagccttaaaggtccttatgacctcctgatttagagactgaattaaagatgtgtttgggggcaagtagaccacttcgatgcctttggtattgaattcatggggttctgggtggccagaggcattttcctatatcaaaagaactttgaaaggcagtcccttactggcaaagcacttcctgacttcaggaaaaaagcatcaatggaaccaatctggaaaaatagttctcattgtccagtccttcttattgtacagccaaaagactgacagctgatgtctatattttccctttaaggctcagggattagcagatttataggtaagggcagacctgaccatcaaccctactgcatttgcacagaacagtagagttagcctatcccttcttgccttaaatcctggtgcttgtttctcttccttactaataaacgtcctttgtgggatatatatatatatttttttttgttagaatggaacactttcatctgcattaaaaacctgttcaggcagatacattttcctctaggaatttatatgcagcctcttggttggcaggagctgcttcttctgttatcttgacatatttttaaagtttttaaaatttttaattcttaaaattaattaatttttggttttttagagacagcatcttgctctgtcaccaagctggagtacagtggcaccattatagctcactgtaacctcaaactccttggctcaaccagtcttctcacctcagccttctaagtagctaggactacagacatgtgccaaccatactcggctaatttttaaaacaatttttgatagagatggggatctcactgtgtttttcagactggtttcgaacacctggcctcaagaggtcctcccactttggcctcccaaaatgctgggattacaaacataagccaccgtgcctggtctatattggcattttaaaagccaaacctctttgtaaaattatcaaagcatcttttattggcattaaattctccaactttagattcttcaccttcttttttctttaagttgtcatataatgactttgctttttcttgaatcttagagtctagaatctattcttgctttatcttgaatattagagtctagaatcatattagagcaatcctgcacccacataaaagctgcattttcaatatgagataaaaggtatttcggaaaaagtgcaaggttttggcacttgctgtcatagctgcaatgacaaatggcttcacaaattttctttccctttttttttaacagtcatctttatgtgtcatttatcttgaaatgaagataattgaagctgcagacctcaatctatgacacatatcaagcaattcaactttttcttgtctggacttttctctgctttttgggagcactcccagatcactattagttctttgtatgggtccaatggtgttattcaaggtttatgatatcgtgctaaacatgatgaaaaacatatgagaactgcaagagatcactttttactgcaatgtgcaatttactggagaaactgcttacgtggagatgattagtgtcatgagaaatttaagcagatatttacaatacttgagcaacaggaggcggctacaaaattattacagtagtacacaataaactctagttaattttatgcagttatgatttaataccacatctttacatttgtttacatttctcttaactgtcaatggcaccatgtttggtctgtaagtgtgtgtctaagttttgaaaatgttaactttttatactttgtgtatatttatggtaataaataaaaaaggccaatatctaaatatattttatgcattcatgacatacttaaccttttagtaactttttattatttccagactacagagttggtctgttagtttttctcaaattgttgcaaatctccaacaaatttttcaatgtttattgaaaaaaaatccatgtatgagtggacctgtgcagttcaaacctgtgttgtttaaggaccaactgtatagatttattattgttactatcagggaccattatttattcagctttactatgtattaactacttcgtcattctcactttagaaaaggacacctatacttcagagagagttgagcaaatcctacaaagttttgtagccagtaagaactgaggtctgcttcatgctaacgccctggtgtctgaccacctccttgttctctgttttggttctgccctggccctcagctgatttctcacatgtgttttggagtgtgacggagtcctgtccggactcagcatcctggcagagaaggccagtgccttgggaggcaggaggaacttccccacctacccggtcatcttcctcctgcgggactgtgggctcagcacattcagtttcggagcttgagtaatcgcctcctggcttccacccacactgggaaggcagcgttgtcgtggactgccactgggctgcttctttgtcagctttgtcctatttagggccataatgaaatcacttgccatctccaggctgagaaatggtcctttagtcttttcccttaatccccagccctcctagggcttctttttcttcaagttgcatttgcacagaactcccagagccacccgtagggcatagctggggaaggcagcccttgacctgtcatgctggtttgtcactctgacaaacagggcttcagggtgcctgagtgcattgagcaggctgggccttggaggagctgcctgaccaggcgaggctgagtgggtgcccctcctttcattccctatccccctccatctactagagattactttcttcaagcactttgtccacatcctttcaaaaatagctttctgccttcagccggaaggcctcagtgtgttctagagacttctctcttgttaaccttctttccctagcaaagcactgaaaagcatggcctgtggtgtcagacacacctggttagactccaaccctcacgcttcctagctctcgttcagccttgggcaagttacttgacttctttaccacaattccctgttctgttaaatggcagtagtgccaacttcaaaggattttcagtacagtacctacagcatacaagcgtgcaatcggcgctagctatcatttcaatcagctgttctcagcaaggtgaagtgaaatctgaaatagttcactggaagatgtgaacagcaataggttttaccttcccagagagaaacatcctttgccagtcaatccttaaatccttctttggtggtgggatgggaaagaaccacattgtaccttcctttcttccccctggtgggagcaggtgagagaagctggcaacagttggctgggcctgcttccagcgtccagtcttttccattcccttttgtattcacccaatgccagagggaaggggcaagaggtttggaagccatttttaaaggtttttcacccgaggattcgatactattttctttgctgaggatccgtcatgcctaatggaactgccatctctagaagttcagtaagttatatcctctgcatctccctcctcagaagagacttttttgttctgggatgaaaggaaactggcccagcctggaaagatgtgcaccccatgaagtccttcctattccctgtgtccccaggtcagacaaggcactggacttttcctagtggttccccagcctggctgcgcgtcagaatcaggcagggaggctttcatgtgcacactggtcccatctggccaaggcctgggtgcagtgtcagctctttattcatctggctcctatgttttctccagaaccctttgtggaaacatctgtctcttacttagaatccaggtcaaatgtttgtcccactggccaagtaactttctccttcttctgggacttcctgagtggtgttctagccttcttcttgctgggttagacagtcatcgtgtgtctgactccctcgaggatggagctccctgtgggagggagtgtgggttacccatctttgcattcctagcatctattagtttggggcaaaagtaattgtggtttttgccattgcttttttattttgtggggggtgggggtaaatggaatccctctctgtcacccaggctagagtccagtggtgcgatcttggctgaccacaacttctacctcttgggttcaaacaattctcctgcctcagcctcctgagtaactgggattacaggcacccaccacgagggtttcaccatgctggccaggctggcctcaaactcttgacctcaggtgatccacccgcctcggcctcccaaaatgctgggattacaggcgtgagccaccgtgcccggcctgccattgctttttaagggcaaaaaccacaatgacttttgcaacaacctaatagcagtggctggtactcagtaggcaccactaaaggtttgcacgaaacgtaatgtatgttttcaaatcacttcttgatattttaccttctagtgcactgcttaagatacagcagatttccattaaaaacttttcacctgaatgtggaggacacagctgagtggcctccattctctaaagccatgccatttgtcagacgtttacctttcttcatcagcccttttcctcatctgccagcatttcccatgagaaaacagtgtggtctgcagtaccctttgcagtgcttggcccagattctccagatttgaaaacatttagcttgtaaagaatagattcactgtttccttcccatctgctgcatcttttgtgcctgttgttcattgagcttttgtattcagcttgaagtaggggatggaagaaccctaacaaacaaaaaaggacaattagaaaaatagtgtctttgacttattctctggaagcctccttcaaaggataaagtaattccctgagaaaagcgttgtgcaggtgtgaattcggtctgggtggaacaagggtatttaccgatgttcttagaagctgcacagccaccttaggcgtggtctcctgggtagcacatgctccagctgtccacaggccattcctttcttcacactcacctcccaggaaaactgcagcagctcctcattgcccttgggaatccaggagttatttattggggatgtttaaagactttcctgatgtatcttcaacttgtcagcttccacatttccccattcaaagctctagaggttacagagggaagtacagagactttagggaaattttaaacattctccatcgagagaaggtggggagctgagtcctggtcccatgtgctggccaacatctccccttccagcctctgtcctggcctggctgccacatatcaccctccttctcctctctcaattatccttgccccagggccctctttggtttcaaaccattcctgcctttctctggacactctcccctgaggagtagactaggcagtcccatgttttccgtgttaactacagaggcacagattggaacaagtgccaaggaattaggccacctaccgagccttcctcttgcctctctctgactctccatcctgagggaagacgattgcagtcgtttttgttggaaatgacctgacctgtgggagcagcccgttcctggcctttcaaagtcaagtcaccttactcatggcctagctcctgatcactcctggtgggtgaaaagtgcctcaacatacctaaagagctgtgacatgagcaggaaagcccctctttctagaaagtgttgggcaccatcagtacagcagagccactgcatcgtacagcgcccggtcaccattctcacgtacagttaccatgagatgatgatggtgcctgtagttacacatttttcaactataatttaatgataaattaattttggtaattataattgtcacttacactgcagtttataattttggatttttaatgatcaattttcatattttcccagctggattatcatcctcttcattgaagccaagaagcctgtgcataagacgctgtatctaccacaatgccttccacttacatttttcgtagtaaatttagtcttgttaatattgcattaaaatgaacctttgaaggcaaagatgagcacataaagcagccctaatcttgtccagtttgctttctattttctccccatgggtagaagttcacctgcatggccctggcatttctattttgtgattagaaaatcacaccagccatacatgatgtttcacttctgtaatccccgcactttgagaggccaaggcgagagaatcacttgaggccaggagtttgagaccagcctgggcaacatagtaagacctcatctctatgaaaagttttttaaaaaattggctggatgttgtggtacacacctgtaatcccagttcttcaggggcctgaggtgggaggatcacttgagtccaggagtttgaggctgcagtgagcagtcatgccactgcactccagtctaggtgatagaatgagaccttttctctcttaaaaaaaaaaaagttatgggaatcattttatactcttggcctggggtcctgctattttaacaacacgagggtatagcacccccaggttgtacaactccagggagtaccatgtatattttcatgtatgtgagcagtgccttccggagtagtctacggaagctaccttgcagcagaactgtcatttaaaaacaatttgctagttatcaaatctatattaggacattagcagaaatgaacatttgtcaattcacttatagtcttatcatctggacaaatcattcttctcatttttccttggtattttacactcctctttggtgtacattaattttgcacagctgtaatttagagtagtctataattttgtattttgcttttttttcctttgcaaggtataagcttttctatgctgtcactgtccttgtcatggttgatggataattattataccaagtggatttcaatgaattatttgaccacttgacaattagcttatttccagtttttcactgttataaagaatgagcagagggcaaaggaagctctcatttgttcactgtgacccgtgtgtcagtcactatactggatacttacctcacttattcctcttaacaattatttttggaactgagacgcagactggttaagcaacttaatagtatgagttgatatatagtgaactcttactgtgtgtcagactctttgctacctacttttcatataatatctcatatctcactgtgtcctataaaatgtgtattatcatttctactcttcagggaattatattaattttaggagatgtttccccaaggtgtcatgttagaacttggagaggacagagttgagcctaggtttgtttgagctgtctaaaactcatgatcgggctgggcgtggtggctcacacctgtaaaccccgcactttgggaagccgaggtgggtggatcgcttgagtccaggagtttgagaccagcctgggaacatggtgaaacactgtctctacaaaaaacacaaaaattagctgggtgtgttggtgcacgcctgaaatcccaactactcaggaggttgagatggaaggatcacttgagcccagaaggtggaggttgctgtgagcagagatcacgccactgcactccatcctgggtcacagagcaacatcctatctcaatcaatcaatcaatcaaataagtggataaaactcatggtcagtataatgtcagctccatggaggtactttttttcctcttgtttttgttctctgctgtgttctcagtgctgagaagaaggcctggcacatagttggtactcaataaaggcttgtttcatgaataactgaatggtctcagcgttaggtaagcagcttgaggtcaggtttctttggctcccacatctttgttttttctgctatatcactgtctcgggtacaggtgagtagaaaataaattctcacaggcagacacagacacatatatttatgaatttgtgtgtgtgagcctttttatctatttaacttttattcagctttaaaaatttttattaaattttattttttaaagcagttttaagttcatagcaaaattgagtggaaggtacagagatttcccatacaccctctgcccccacactcccctgttatgaacatccctcacagagtggaattgtaattgttacagctgatgaacctacattcacacaaagtccgtagtttacattagggttcccttttttttttttttttgagactgagtctccctctgtcccctaggctggagtgcagcagtgcaatcttggctcactgcaacctctgcctcccgggttcaagcaattctcctgcctcagcttcctgaatagctgggattacaggtgtggggcaccacacccagctaccttttttgtatttttagtagagacagggtttcgccatgttggccaggctagtctcgaactactgacctcaagtgatccactcgcctcagcctcccaaagtgctgggattgcaggcatgaaccaccacacccggccactacagttcactcttgatgttgtatattctatagttttggacaaatgtatgatggcatgtgtctacctctatagtatcatgcagagtagtcttactgccctgaaaaatcctctttactctgtctatgaattccttcctccctcctaacccctggcaaccaggatcttttttactctctctatagttttgtcttttccagcatgtcatatagaatgcagcctttacagatcttggtaatatgtatttaaggttcctctacatctttttgtggcttgatagctcatttccttttagggctgagtaatactccattgtctggatgtagcacagtttagttatgcattcatttactggagcacatcttggttgcttctaaattttggcaattatgagtaaaactactatagacatctgtatgcaggtttttgtgtagatgtaagttttcaactcctttgggtaaaataccaaggaatgtgattgctggattatatggtaagagtatgtttagttttgtaagaaactgccaaacttttccagtgtggtgctaccagtttgcatttccaccagcaatgaatgagagttcctgttcctccacatcctcttcagcagttggtgttttcagcgtttttggatgttgctcattctgatacgtgtatagtgatgtctcattatgtgtgatctttttctttccttttgtttattttgttaggaattattgtgagaaatgcaattacgaaagcaaattgtaaaaacattttataagaaaaaaattgtaaaaacattttataatttcttaaaaatatattgatttttgtttttgctgcttacataagtgtgtcttgttagtggacatgcaaaaaatggtccagtttcactgctaccttgccagtgctgttttaaaaaaattctttactaacattatatgtgagtacatcactatgtcaatctttcaatttatttctagttcattatttgcttatggatcttttacgaatgttctatttagcaagatatcatatttgttttgaagcttggtgctactgcctcctaaacaatgaatgtttttcaggtcccaaaccagttgtcttcctgcaacatggcttgctggcagattctagtaactgggtcacaaaccttgccaacagcagcctgggcttcattcttgctgatgctggttttgacgtgtggatgggcaacagcagaggaaatacctggtctcggaaacataagacactctcagtttctcaggatgaattctgggctttcaggtatatatgaattgataatggcatggatgtatttccttagtactcttaaagcagacaacaggcttccagcagaagaggtagataggtggtaactctgaagttgtatgagaggggaagttagtgtcttttgaaaggttttaaatgttgctaggaatttaatgactagcagtaaggtaaattataagtaaatgattacattaagatttacatttagttaggaattcttaagttacttcggcatttctggtggtgtgggtgctgctgggtaaacgttattccataactttcctcctttctccataaatatgtaatccagatgttcacttttcttctttccagaaattatcctttcctccctcttccttctggctccaccagttaattgctgtatgacattggacatcttacataagcctcctgtgtctcggtttccttatttgtaaaatggagcgtaataaacacctacctcataaggtcactgggggcttaaaggagagggtgcagagaaggaacctccacagaacctggcaccttgtatgaactggctaggggttggctcttctcctgccagtggcaacatgcgcatgcatatacccatacgcacacttgggttttggtctatgttttggtaccaggtattagagaaagtcagcagcactatagcagcctccgggcttgcttcccatttttaaaaccagaggcacctctaaggacatgaaacacaagaatgagagcttttaacaaaaggcatatacaagaattggtttattgtcacgctatttgtaacaacggaaaacaggaaactacccaaatgcatgtcagcagtgaatggataaagtgttgtatatttatatagtagaataagaatgaacaacttacaattatatgcagcaaaaaatggattaagccagatacaggagaatacacattgtataattctacttacagaaatatttaaaaacaggcgaaactaatttctggtgtgaaaaatgaggacaatagttacttttgggagacacaactggaagagagcccaagggggcttctgcagtcctgctggtgttgtttcctggactcactgctggttttcccagctgtgtttagtttgtgataactcatcaaactgcatactcagtatgtgtgtgctctattttatgtactatttcaatgaaagagttcctttcttggattacagttatgatgagatggcaaaatatgacctaccagcttccattaacttcattctgaataaaactggccaagaacaagtgtattatgtgggtcattctcaaggcaccactataggtatgtatgtaaataagatcagaagttgatataaattcttcattacagagtttgtacttttcttaaaagtgaaatataaaaagatgttagttcaaattccatttatttttaaatgccaaacagaaataatgaataagataaggaatgttggtaacatttagtcttctatgaaaattcatgtatatggttgaaattgaagaaattaatgtaagccacaatatattacatgttttcctagatgaagcaagatagggatgtgagagagtagaaaacaagtagtttctaagttcagagacttacataaagaaaacaagaaaatatactgccttctgaagttaagtggaatataactaactacaggtacatttggtttacaaaaaattttgaaaagttatatgcattttaatttatgctgattatataagtaatgcatgttcactgtagaaaaacagaagaacagaagatttagcaaaattaaagaaaataaaaattgcccataattctagtcagcaagagtttttgtaattagggactaggaacctgtcctataatttatttaattctcccttttaatgtttactatgactaacaccttagtgttcccatcacatgctttccttacaatatattcctagaaggagccttactatatgaaaggtatgaatgttttgaagggtctcaaaacatgtggttatattgccaggaaaaaaatggagttaggcatttttctttatttatatttcttctttcatgacttgcctgcttgggacctttgccccactgcttcctaaagtgacattctggggccaggtggcaagacgtcagagagggttgtattaattcgttttcatgccactactaaagacatacccgagactgggcaatttataaagaaaaagaggtttaatggactcacagtttaatggattgtgagctagggaggccttacaataatgacggaagagcaaggaacatcttacatggtggcagacaagagagagtgagagccaagtgagggagtttccccttataaaaccatcaaatctcaagagacttactcactaccacaagaacagtatggggggaaccgcctccgtgattcaattatctcccaccaggtccctcccacaacacatgggaattatgggaactacaattaaagatgagatttgggtgggaacacacccaaaccatatcaagggttaaaatatattttaaagctaggggattctaaatgtgtgagttcctttgaaatcattggtggtttatttcaacgtggtgtctgtaaattgttctttgggggaggggcatgggggagataaaggtgatggggtgaggctcttggaaatagtctgttatttacattgtaaaaggaactgggaagattttctgattctcccagactggatttcttccagtgcttatctaggttgagatttggagcaagcattaacaaatgcttgatttactagtttaaccaaattcagtgttagggcacacggaagttcagagtgccccatgtcaagtgttttggctcctgctggtggtattgtttgcgtgggtctcaggcctccgcgagagggcgtcgcgagtgacggcctttgtgttttctgagaaggaaatcccagatgatggaattcctgttttctgtcctttgttctcacaggttttatagcattttcacagatccctgagctggctaaaaggattaaaatgttttttgccctgggtcctgtggcttccgtcgccttctgtactagccctatggccaaattaggacgattaccagatcatctcattaaggtacttggacccctcccatccctctcctctccccgcagatttcctcctgagatctgaagaaatggcaaggggagggataatctgtgccttcctcccctgcgttttgatatcagtggagcagtgggcttttctttttccgtttacccctccttccagacccaggggtggccggggacgcctgtcgtttcctgcacactggtgccacgtgtactcatggttagcatgtgtcagtacagctctgcccacctcacagggagagcaaggagagtctgggagaaaataatttaagcatttgtggagttgccctttatcccatgaggtgagcctgtgcacagaggatgtaggagatgggagataggaaatgttcccaaaagcccatccctagctacactgagggtgacctaacaacgctatcattattgtattttataatatggctcctaaacacagccagtagcttcatcagggctctgccctaaagctgtggcacccgaacctctgttcagggaggaaatagatttcatgaaaaagagttttaagctaggtaagaccagatgttctattatgcatgcattatatgtcttttatgaaatatatgttcacacacacacatatgaaatcctgtatagaaatatatacatgaaatgaggtataacgtctctcatgggccatttagaagacttaaataggaaagatggaatctcctaggcttaggcagtccttctgccttggcctctcaaagtgctgggattacaggcatgagctaccatgcctggccaataaaaaaaattttaaaaaacaaaataaaaaagcaagcgatgggctggatttggcctgctggccagtagcattgaattagatgggcacacctctggcagacattactgatcaatcacagccttgactgtttcttagaagtaaccaccgatccatcagagtcagatgaaaattacttggggatggccctgggaggggtgatcattaaggccctttcccactgtagaagtccgctgaaaacttatttgattttctgcctccttctcttcatttggagaatttaaatacacctctgtagtgtgtgatttttgctttggtaaacttgtgcaaaagcatcctgatttgatgtccactggttgccattctctcctgaggccattcgtggagacattgggtacttgtctctgcttctgaggtgagtcacggagacttatgcaccagagtgaaatgctgagatgttcttgggtttctttttattttgtaggacttatttggagacaaagaatttcttccccagagtgcgtttttgaagtggctgggtacccacgtttgcactcatgtcatactgaaggagctctgtggaaatctctgttttcttctgtgtggatttaatgagagaaatttaaatatggtatgcatgtttatagtaagatttgatttttttttttatctgtgaatgtgcttatttgtgttgaatgatatgggagaggtgggaatgacctcatcagaactctaaagagtctttcatttgagaggcacaagcatgaactttggccaatgcctagaatacggtaccacctgctgccatcctcaggctgactgtggtcaccttcttatgttgtacctagatggagattattgaatgaggagatctgtcacaaattaagctgtaatatttataattactctagtgatttgtttcttttagaaatcattataagtataaacataaagatgggaacaatagacagtggggactccaaaaggaaggagggagagggacaagggctgaagcctgttgagtactatagccaatattgagtactgtggttatgggatcaatagaagcccgcatctcagcatcatgcaatccacccttgtaacaaacctgcacatggaccccccgaatctaaaatacacaaattttcaaaaattactataagtatttaaatttggaacggccatttacatacacataagtgtatgcttgcagtgtgtgtgtatttataaaagtacattttataaaatgtaaacccattttattttataaaatataaacccttggccaatactatgcccgtgtttctaaatatgtttgttagtttgtcatgtggcattttgaaaaaaagggttaaaatcctggaataaaggccctaaggaatttcagtgccatttttcttttgtctgataattaaagcaaggtgtgattgttatatgaaatttgggaaattcaggaaagcatgaagaacaaaatgaaaatgccctgtaaacgaaacccacacagtcccgtgcttaccatgttgttgcacctccttcatatggactttgtatgtggttgtatgtatttttatagggcagatttttagtcaaataatttttttctacctctcatctcacatacttgagattatggctctagtttttagtgctttgaagggcaaaatacaatgtttattatcaatgccaccttaatgctgttttcattcttcatttcaatgtatttattttgcagtctagagtggatgtatatacaacacattctcctgctggaacttctgtgcaaaacatgttacactggagccaggtaggcattccaggagtgcatttggggttcatgtaaaatcaacatcagaaaggtctgggcatgcaaaccctttccaaatagaaagacaacctgcttacaaatctgatctggttttcttccccagagtcctgggtttttgtcatcgtgcttgtgttgcttttgatacctgtggtggggcacactgtgttatacgtgggttcacaaacagctactggggttgacatttttcttttccctcctctcccttcctcaagtctcaggttaatatattctctccctttccttctcccccagctttcttttcctcctcctgtttcctcccctccatctgcttctcattgagtcctagattttttttatttctgtgttgcttcataaagagtgattttaagtccgttttggagatagaaaccgctgtttcaacactaacccctgatcacaatatgcttggaatagcagtgaataaactggagctaaaccaatgatagatgtgaatgggggcccctgacttttgaaatacagttttgattattttatcatgtaaataagtcatgttcattctagaaaatttagaaactacatctagaaaaaaattatcttaaaatgaaaataaaatcattctataaccctagacagagaggaaatgcatatccatagatattgaatgtctctgcattctattctatacctcttttcaaaaagatgctgttaaagacatggatagaaatagtagatgtagaaatagattgatttttctcctgcttactgttttacagcttgcttttcttttttcacctgacaatatgtcagggacttctttctacctcaggacataattttgtgccatttatttttcagctaacttcatttttaatatgaaacaactcaccatttaagccctaaaccaagacactgtaggtgtcttgaatagtaatttccaaacacctggcagtcactgcttgcatcagaatcaccaaattgctttaaaaagtacactatttaataaatcattgcattaaaaaagtaatgagagttggaattatagtggaattctataaaacaaatactcctgtgtcccaatcatttggactagagaatctgtacttttattttttcgttttattttatttttttgagatggactctcactctgttgccaggctggagtgtagtggtgcgatcttggctcactgcaacctccgcctcccagcttcatgtgattctcctgcctcagcctcccgagtcgttttattattttaaaaaaaaattttttattgaggtataagtgacatagaatatttaaagtatacaatttgatatatttcagtgtttgtatacacctgtgaaaccatcaccataatcgacacagcaaatatatcatcatcctaaaaggtccctgctgcccctttgtgatacctccccccatccctcccctcaatcccactgatctgcttcctgtcattgtagcttagtttgcattttctagagcttgcatgagaacagtcatgcagtttatacttgtttttgtctggcttcttccactcagaatacttgttttgaaattttcctatgttgtgtatgtcagtagttcattcctttttatttctgaggatctgcatttttaaaaaatctgcctggtagattcttttgctccaccaggtttgggagcagacctgttcgggacatcctgatactttcatctccttcttcagttgccccaggaactctaacagtgctatagttctcctttccctggggctcgtctctaaggaactaggaagagcctggcctgaggctcctggtcctttatagtaactagaaggctgagagttaaatgtcagttcctcaggggcagagtttgttgtggcctaaaagaggggcatctggaatgcaaatagttcatgacgtgctgaacagcacatgcttaccacttaaggaatgcccccaaaccttcaaaaatcctcaaattcacaaagattgaggattttcgttcttggttcaggtctctgcttttctccttggtcacatttatgcttatagtcacttgttttcttcatataccctgtcactagaattcccctacatttttgaggatgcctaggacctcttacctaatggacattttcctaaaaggcccaatgtctgtcacctcatcagttattgcacccccagagatgatggagggtgactgagctggctggaggcagatcctgagctttcccaccagcttagtgactgccagcagcccacacacagtacacgccaggcctcagcaaagtacaaatggccaccagacctgggatgtcagaggcccttgggaatgttgaaaccaaggctgtcctaggccaactctattttatattacagacctgtgttgcttcacccttctgtgtcttgggcctccactgggcatggggtttgcagtagagacattggatcggctatcatctaggctactggtcttgttccagccctcttatccagcagcttgccagggtcaaaggctgcagggtgagggccagagcactgctctgtgccccatttgtgacctggtgactttagattctaactaccctggaatatacctccagaatatttgcaaagcccagatttgctgtacaaggcagcctgggcctttgctcttctacccgctgtaccatcttttgtcagtaaaatggttggttgctttgtgcagccattgtatcggatcttccctttggctttccctcctctgggctgttggccaggggctgccactggtgcaggctgcaggctccaagaggcagtgcaggaaaaggcttctgtggaagctgggcaggcctggatgccgggcaggctggggctagaattcaggtgtggcattagagggctcttatggtatgagtttggggttgaccttaaaggccattttgtttacagtccattcagaagtttactttttgtttaaataattaggattaacttgttaataaattccataccttgttctttagcgggattttaaatatagcatactcatctttccattctccttataaacctgatgaatttcggagctccccagagccaagacttgatattacttctcactttctcactggccctgcccagagcccaggtactctcacctgtttgaagaaggccatcccagtgtagttttccagtgttgttctgacctacctaaggtgctattaaaaatactggttcttgggcctgtctgagacctgtggagactctgaattcctagggctgtgaccctgggatctatgtttgagttaagtgccttagatgattacgatgtgctcttttttttttctttaaaggaaaaaacatacttttggtaggcttttaaagaacactgtaaaaaggatattcagtataatttttgttaaacatgtaatatgttttatgaaattttagaaaatacatgagtgaaagaaaaatgacttgtatgtctagcacccagcaatagccactattaatattttggtataatcttacagttttgtaatataatcatttccattacaaaagtcagatcatactacatctgcttttatgtaaattttcatttaaagaaatgccattatatttgttagatacaagttaagctgttgtattagagaccccaaaatacagctgctaaataaagagtttatttctttctcataataaagttcagagagaggtggcccagactgatgatagagggggttttggctgtgttccatgaggccatgcagggacccagttccctccatactatagctctgccatcctcggggtgttgtcctcttctgcctggttgcagcccggtcacctccatgtctcttccaactcacaggaaggcaggggagagggagctcagggcaagtgactttgtgcgaaggagatagcttagaagtgagcggtatggccatagcctggctgctcgcaggaggatgaggatgtggtttctatcttggcagccatgtacttagggaaagctttagggattctgttactgaaaggaagaaggcaagaatgggaatgggtggcagtctctgccataattaaaaatgcctttccgggtcagtaactaaagttttaaaatatttgtcataaagggcagtttctgttgcttgaattttattatcattttgttttttgcagtgatagttgttttgcagtcataaatcatctgtccttatatgttagagtgttttcttaggatgatacatttatagcagtagacttagtaagggagagggtaggcatagctttaagacttctaatacatattgtactttagaaaagttgaacccgtttacatttttattaccattcaagacctaaatataatttttaaatgtcattttaaaacggtttatcctaatactataggcatttcctcctgatcattatctacatatactctgtgatatgattatcacagaagtataaccttagtgtatatttggtttcatttttttccacttagtattatttatgagattatctgtaagccattttctgtttgtattttatttatatttatgacagtggcataccccttgtgtatatttatgtaacatatttacccaaatatctattatttgaaatggtaagttttggccacaaggtggcgcccggtaaaaagaaatgcccagacattctcttcaaaactgcttttggtttatgtgaagtctgttcttatcaactgcatacaattctactgtttgatgtaataaaacacagagcgagatgatatactacaagggattgttacttattaaaattgggctttagcttatttccaggtttttgttactggaaatcatcttaatacttttcttttgaaatatcctttcaagtggatagcttgaagtcctaagtgacttagcacaaagtcaaatttagaacttcagtctgagctataggcaagtttcacctttgtattctgtgctcacgctggtgcttcatatgaatgctgaaggacatgtgacaaagtgatgaactgctgtctgtgttcagtggcagaatagtttgcatcaatatattttcactgacaaagatggggaacagatgtaccaacaggtgctgtgaatccaaattttgttttgcttgttaaatatgccacaggtatttaatatcagtcatttgcaacggcaaaaacagatgccaaatatttctcctgtaacaatcccctatagtatatcatctcactctgtcttttattacatcaaacagtagaattgtatgcagttgattagaacagacttcacataaatcaaaagcagttttgacaaagaatgtctgagcatttctttttaccaggcgccaccttgtggccaaaacttaccatttcaaattcatttggcttgccaattttgtgtttaatttttgacatacatttaatttgagagtgtagaggaaatatggatttgcactattttgaattttaaaaataagtgacattttgctaatattttatattatactattttaaatatgaataaatgtaaatttcaatacaatttcaatttcatggctctagtatccctaactagttagaattgtgctggcatgcagtactacttggtgattatactgataccagtactcaagaaaaagtgtttaatcaataccatcattaaaatttgactaatataactagacaagtagaatgggtaaatagaaaatatacagtcatccctcaagtatctttggggactggctgcagacatcatccccaaaccaaaattcacagatactcaagtcccttatataaaatgatgtagtatttgcatatagcctatgcatatcctttcatatgctttaaatcatctctagattacttatgatgcttaatacaatgtaaacgctatgtaagtaggtgttacactgttttaaaatttgtattttttattgttttattatcttttattgtttttttccaaatattttccatctgcaaaatatcacttggctgaatccacagatacaaaactggatatggagggccaattgtatattataattattttatctatatatatccatctctctctctctctctctattatatatatatatatgtatatatatatgtagctacctatctgtctacctttatttcccaagtaaaatgactaactctttgaaaaagcttaggatgcaaatttcagcagaaaatgtcagcataaagttccgctagcaggagcaactgttgatctagtataattgacagcatatgtgcatagctgctttcttgtgtcaggtggtagctgcttaacaatcatacaatgagaaattgagtcattcagtaaagcaggacaaaaccatgccatctcatttaaaataatgccttggaaatgaagagtaaatctggatattggtataaagttgatttccgaggttgtggctagctccagcaacctatgatgttatctctaactttggtgtcagataactcttttccaaattatcttctttttaggctgttaaattccaaaagtttcaagcctttgactggggaagcagtgccaagaattattttcattacaaccaggtaaagtttttagtcttttcattaaagggggccctgaaaactcatcaagaaagccagcctggcctatcaggattctggccaggctcaggtgctgtgggaaatgtttgcaggagttgactagtgtttgttttccatcagtccattcagaacaatccaagctttgtagctggtgttgtggactgggcctcctctctttgtcctttccccagctctaaataagaatcatcactgttatgcattactcagagtaatcacgaacatagcctgtagagtcagacagtcctatgtctgttatctggtagctatggggccttggccagattacattgcttaagcctcttccctgcactaataaaattagcatttttgagcatgctaaatgcactgaagtgtgaggcactttgctctgttttttaaatttaattcccagagcatctctgtgatgtaaacgtgattatctctgacttaaacatgaggacagtgaggcttagagaatttctgtgacttgtcttacacccaaagggaagaagtaggagggcatgaccccaaactctttccagccactattgccttgagtgtactacctatggagtacaacaccttccttgccggggattaaacattcattttggtgcccagcctacggcagcagctccacagctagtggcgattataattagcattctctcatttggggttagatttctttttttgtgccggtaatggcaacttgaaaagatactcaaagagattttaaaaatttagtctgttagtcaaacttactagacaatgtttaatggagattgcgcttattgtgattttgaaaattaaaacaacaacaacaacgaggctttctctggttccttttcattgtagagttatcctcccacatacaatgtgaaggacatgcttgtgccgactgcagtctggagcgggggtcacgactggcttgcagatgtctacgacgtcaatatcttactgactcagatcaccaacttggtgttccatgagagcattccggaatgggagcatcttgacttcatttggggcctggatgccccttggaggctttataataaaattattaatctaatgaggaaatatcagtgaaagctggacttgagctgtgtaccaccaagtcaatgattatgtcatgtgaaaatgtgtttgcttcatttctgtaaaacacttgtttttctttcccaggtcttttgtttttttatatccaagaaaatgataactttgaagatgcccagttcactctagtttcaattagaaacatactagctattttttctttaattagggctggaataggaagccagtgtctcaaccatagtattgtctctttaagtcttttaaatatcactgatgtgtaaaaaggtcattatatccattctgtttttaaaatttaaaatatattgactttttgcccttcataggacaaagtaatatatgtgttggaattttaaaattgtgttgtcattggtaaatctgtcactgacttaagcgaggtataaaagtacgcagttttcatgtccttgccttaaagagctctctagtctaacggtcttgtagttagagatctaaatgacattttatcatgttttcctgcagcaggtgcatagtcaaatccagaaatatcacagctgtgccagtaataaggatgctaacaattaattttatcaaacctaactgtgacagctgtgatttgacacgttttaattgctcaggttaaatgaaatagttttccggcgtcttcaaaaacaaattgcactgataaaacaaaaacaaaagtatgttttaaatgctttgaagactgatacactcaaccatctatattcatgagctctcaatttcatggcaggccatagttctacttatctgagaagcaaatccctgtggagactataccactattttttctgagattaatgtactcttggagcccgctactgtcgttattgatcacatctgtgtgaagccaaagccccgtggttgcccatgagaagtgtccttgttcattttcacccaaatgaagtgtgaacgtgatgttttcggatgcaaactcagctcagggattcattttgtgtcttagttttatatgcatccttatttttaatacacctgcttcacgtccctatgttgggaagtccatatttgtctgcttttcttgcagcatcatttccttacaatactgtccggtggacaaaatgacaattgatatgtttttctgatataattactttagctgcactaacagtacaatgcttgttaatggttaatataggcagggcgaatactactttgtaacttttaaagtcttaaacttttcaataaaattgagtgagacttataggccc

SEQ ID NO: 468 - DNA, 40178 bp, Homo sapiens
  allele 1197,1841,1852,2075,6063,6173,6194,7219,7820,8242,10114,10606,10688,10729,11559,12031,14497,14729,21145, 21329, 21404,: N is any
  allele 1307,1308,1309: deletion: ATC
  allele (28453)...(28465): deletion: TCCGCGAGAGGGC
  allele 21429,22246,22354,22621,23802,25283,25969,29904,39834,40018: N is any
tgtatctaagaagcaactaacttgcttttgattttaccagctaataggtggaagggacttgccttgtctcaggtgagactttggactatggacttttgagttaatgctgaaatgagttaagactttgggggactactgggaaggcatgattggttttgaaatgtgaggacatgagatttgggagtggccaagggcagaatgatatggtttggctgtgtccccacccaaatctcatcttgaattatagctcctgtaattcccacatgttgtgggagggacccggtgggagataactgaatcatgggggcagtctagcccatactgttcttgtggtggtaaataagtctcacaaggtctgatggttttataagaggaaaatccttttacttggttctttctctcacatgtgccgccatgtaagacaagccttttgccttctgccatgattgtgaggcctccccagtcctgtgaaactgtgagtcagttaaacctttttccttcataaattacccagtcttgggtatgtctttattagcagcatgagaacagactaatacaccttctaattagtctccctgcttctgtagttcagaatgatctttctaaactagattatgctgcccttctattgaaaatattacactggcttctcatcttactcagaagacacggtaagatcttgacaagtggctcccaaggcaccagacttctaggacttcatgttctattactttctactatgtacattctgttttagcctcaaagacctcaccactctggctaggacccaccaggaatattcctaccacagggcctttgtacctgctattttcacccagaatgtgctttctccagtatctaaggctgttaactacctccttgcctgtgctcaggtgtcacttcataagagtcctttcctgattaccatatacatatcatcctccttatccctgtttttttttttttttgggggatggagtctcactctgttgtccatgctggagtgcagtggcatgatctccgctcactgcaacctccacctacctggttcaagccattttcctgcctcagcctcccaaggagctgggattagaggcacacaccaccacacccgctaattttgtatttttagtagagatggggtttcaccaagttggccaggctggtcctgaactcctgtcctcaggtgatccgccntcctcagcttcccaaactgctgggattacaggcgtgagccactgtgcccagccccttgttgtttgttgttgttgttgtttgtttgtttttgttgttatttatagcacttatcaccacctcatgtattatatagttattcatgatgtgtctcttcccatcagaatatatacaagagaacaggaaccttgtttggttggtttctatacctccactgtcttactaatgcctggcatttagtaggtgctcaataaaatctttgttttagaaaatgattaataaataatatgtacatattgaatattgtttcctcttttaacaaatctttaataataataaaaaatttaaagcagcaagattgctttgcatcaggcacaatgataagcgctttaaatggagcccatgattcactttcatttatagagcccacatgctctctgtcaggcgcagaaggtgccagccctgcaggagcttcgggggcggagcagaaggccgcctaaaacagcctttgctaagagagcatgcgtaggcgacgcgctggtagagctgtggacctgccagcctgcgaggcggaggacgggctccatctcttagaaacgcctacggcgcatgctctatggggtcaactggggggctggcaagcggcngcgctggtctngggcggagtctccgaggcacttcccggtggctggctgctctgattggctgaacaaatagtccgagggtggtgggcatccgccctcccgacaaggcagaccaggccccctgcaggtcccctatccgcaccccggcccctgagagctggcactgcgactcgagacagcggcccggcaggacagctccaggtgagagtgccggcgccgcggcgctgccaggtgcgngtgcggcgtggaagctggtgccttcagcaaggggagggtcgcgccccgaggctctgccggccggcaagaccctctgcgtttggacccagcgagtcttgcctggggtgcctgcgggtgctttttctgcgggcgttggctcaaggcatctgccaatcaaccagggcaacttcagagagcaacttcagagagaagcccactctcttccctgggcgctgtccactttcctggacaggcgcggtctccggtcagtgaagctgcccagtgctcctggaccgcgaggacagcagggatgtctgattcctctctctgcatcctcgtgctctccccttagctcctccaggcatcccatcctacctctcttgttagccaacggcgtggtcgaaagcagacttgggcatcaatcctggttaaagtcccagcgatactgctttttaaacagctgacactttgcttccagtacttcagctgggtgaacctcagattcctgaaaaatggaattaatggtactgccatagggtcggtggaggagtaattgacagtagatcagaagcgctgcctgcggtggctggcgcctcgcaagagcttaaatgggagtcgtaataattgttgttattagaaagttaaatagcatgctgcgttggggccttttcttctgccactgaactgttggactgctcttatcttttttcagaatctgtactatgcatctaatatatacgtggcactttgcttggtcctgggggtacaaagctgagtcagattgttacaaagtctaaataactgagataaaggtgttaatacagcccagaaaagcacacttaattcagcctggaaggttttttttcccccctccttcgagattttcagagtatctccttcttagtaagaattgcttggcttagtatgttgagaaaaacatactaagtatgtagtgttgtgttggaaggaaaacttaactgggtgagattttcagctgagtagctttagctgttactctcatggaccttcctctgggcggttgatacaggttctgtaggaaaaccgctgaatgaaagcagctcctgcagatgctattctgttttcaattgtggtaattcctttaattttttccctttcaatttactccttattctctagtaataatggacttttgggaggttgcatttatgataaaaaatagcctggggctgtacaatccttcctatcatgaagaagtacaaagttgtaagtagaagcagtggccttgctttgccaatgcacactgaaggggataacgtttgctcctgttcagagttcacggtcgggcgcggtggctcacgcctgtaatcctagcacttttggaggccgaggccggcggatcacgaggtcaggagatcgagaccatcctggctaacacggtgaaaccctgtttctactaaaaatacaaaaacaaaattagccaggcgtggtggtgggcgcctgtagtcccagctacttgggaggctgaggcgggagaatggcctgaacccaggaggtggagcttgcagtgagccaagatctcgccactgtactccagcctgggggacagagcaagactgtctcaaaaaaaaaaaagaaagaaaagaaaagaaaaagaaaaagaaaaaagaaaaaagaaaagaatttcagagttcactacttcttggaaaaaaataatcccaggaggaattccatcaacagaagggagtcagttcacttttgcaatctcctgagaatcaatttcttaagacttgtggaatattcagtttaaacacaaaactaaaaacaaacagctgtattggagtattattgacatacaatagcatggcatatttcaattgtacaattgtataagtttttgcatgtgtacacacctgtgaaaccatcagtacattcaatattatgaacctgtacatcacctccaaaatattatttgtgcatacccctttgtgatcctttcttactgccccttctctccaggaaaccactgatctgctttctgtgaatatagattagactgcattttgtggagttttatatgaatgggatcagacagtacttttttttttccttattttgatctggcttcttttggcataattattttgagattaatctatatttttttgtgttccttcccttttatagctgagtagtaggtatataccataatttatccaatcatccatttaaagcatttgggtttttccagtttttgtctattacacccaaagctgttataaacatttatgtacaagtctttgtatgggcatacatgcctgcatctttttaagtgattctatttattttttaaaaatgtagaagttctgggatctagtcctaggtttttctctgaccacttgcgtgatcttaggagaggcatttaactttgccttcagcatcctcaaggtctttgctgtgattttgagtcatcactgccagaaaccaagatggtctttgttgatttgatggttagagaatttcagaaggagagagacgggtcaaatttttcctttctgtttcttttgaaagctctattttctttcatttcacttttttcccatgaatgacaaatttaaatgctgacgtataatttggggcaagaacagaagtggttagataagtaggaggaagagctaatagtggttagataagtaggaggaagagctaatagtggctgaacttaaacatgtctaaatcataggtggaaggcaagaggtgggaaataagcaagctcagaaattttgtgtctctttctttttctcaaactatcctcttctaagtcttgccttttgttatttctccatgaccaatttgtttttaactttggggttaggaggtgaatgggtatgctggactccaaaggtcatatatcaactggaggtggtgggtgggaggtttcttagttaaaagtaattcctttgggccgggcgcggtggctcacgcctgtcatcccagcactttgggaggccgaggcgtgatcacgaggttaggagatcgagaccatcctggctaacacagtgaaaccccgtctctactaaaaaaaaaaaaatacaaaaaaatttgccgggcgtggtggcgggcgcctgtagtcccagctacctgggagtctgaggcaggagaatggcctgaacctgggaggcggagcttgcagtgagccaagattgcgccactgcactccagcctgggcgacagagcgagactcagcctcaaaataaataaataaataaataaataaataaataaataaataaataaatataaaataataataataataattcctttgggaggcggaggcgggcaggtcacgaagtcatctgagaccagccttgccaatatagtgaaaccctgtctctactaaaaatacaaaaattagccgggcatggtggcctgcacctgtagtcccagctactctggaggctgaggcaggagaaccgcttgaacctgggaggcggaggttgtggtgagccgagattgtgccactgcactccagcctgggcaacagagcgagactccgaaaaaaaaaaaaaattcctgggcaggcgcggtggctcacgcctgtaatcccagcactttgagaggccgaggtgggcgaatcacgaagccaggagttcgagaccagcctagccaatatggtgaaagcccatcgctacaaaaatacaaaaattagccaggcgtggtggtgcgtgcctgttgtcccagctacttgggaggctgaggcagaagaattgcttgaaccaggaggcagaggttgcagtgagctgagattgcaccactgcactccagcctgggtgacagagcaagactccatctcaacataaataaataaataaataaataaataaataaataaaataaaaataaataaataaaatttaaaaattccttattctcctttcagatatggctggagtcatttgtttcatattttcctttcaccttttacttgccctaaatctggttcagaactttttgtgggagcattaanttaccagaatatttttgtgtagtaaaattcaagcaaataataatagactgttttattatacagaatgaaaatgcggttcttggggttggtggtctgtttggttctctggnccctgcattctgaggggtctngagggaaactgacagctgtggatcctgaaacaaacatgaatgtggtaagtttctcaaagttatgtacttttaaaatgcatctatttccccgatccagttatgtgagctacatgaagccatacccatacattcatctctttataactcctttgcttttcaatttctctgaattttttttttttttttttttttttttttttttgaggcagagtcttactctgtcacctgcccgcccaggctggagtgcagtggtgtgatctcggctcattgcgacctccgcctcaggggctcaagtgattctcgagcctcagcctcccaagtagctgggactacaggcatgcaccaccatgcctggctaattttttttgtatttagtagatacagggtttcaccatgttgcccagggtggtcttgaactcctgagctcaggtgatctgtccacctcagcctcccaaagtcctgggattacaggcgtgagccaccgtgcccagcccaatttctctgaatcttagattcaatttgctaggcttttctcaccaggtaatatgtagccaacaaacctcagtttaatgttatatatacttcttaataagataaattatgattttttattaattcatttcatttttaagtctcactaagtttgtttaaactataaaaaagtatttaaactttgcaagaacattaccgctattgagagctggttttagaatacattgaacaaaggttgtgattaagaatgtccagggaacatatttctatacagaagtcaaagtatctgagctaaattttgttagaaaaaatatgcaaaaataaccactcgactaattaaaacatctgaaagttattaatcgtaagtaaacaataaaatctggaaatacctcatttaggcacaaaatatcagtaaagtacaaattattaaagaaaacagcaactttaaaatagatgttgcagtgacccagctgaagaatcaggcaagcttagggactcgcagagaaattcacagtgagccaggagagtatganctgataacagggtcttaaagttaagttttacttcttagctcaaagcttttcttttgcctcccaatttttccaacttttaaaataattttttaaataagaatgataaaattaaattctttcaagtacttatggtagagagggtatgtgcacttatttacattaaatcccctggataattgaattatccatatcccactgagctcctgattaacaattgtcccatgaatccttccttatagaaaagtgaatgtgaccataattccctattttgttcaacttttcttccatcccaccttgacattctatgtaattattttagtccattgataaaaacaagttaatattttttatactttattggccagcaggggatctctcaaaacaaagaaagtgttttatacattgacagttctagctgggatatttagaaaagaaagaaatgagcatttatttgtgcccggtaggcaggatggaaacaaagaggcccaagatgtggtaaagttaggcaaatttggtataaaacatgctagaatgatgaaactgaagtttaaccagacaccggtaggtggaacacaagcgtgaaacaagggaggatttactnttgtgatgagaagttggctactagatttagcagactaaaatttcaatgacaaatgctttcttaaagcctggagaacatagtttatctgctcctttgcttgttaatgtgggagactgtttcagattctgtccacccaatttccatcgtcctttttctctacagagtgaaattatctcttactggggattccctagtgaggaatacctagttgagacagaagatggatatattctgtgccttaaccgaattcctcatgggaggaagaaccattctgacaaaggtatgggaaggctcttaaaagtaaaaaccagaattcttctgggttttgtgttagtaaccaagttcagatttaacttaaaaacattgaaatgggattatttttagacgaaagcactaactgtgttgaggtttgcaaggcaaanaaaaataattttcttttaaagaagtaaggacaagagtcatctaattttttgttcaaaggccagattcatttgaggatatgctaaaatctctgaggctttgtttttttaaggaagtgtatttaatgaaatgttttgagcattaaatagatggcttttgctatttaaaaattatttaatttttttgaattcacataatctaaaaatcagagaattagaagacatacagtgaaatgcctcccttctctctcactccctacttcctgcttttttgtgtatctttttgaaataacttcattttaaaatctttttatttccaaaaatctcattagaaacaaatacacacacagattcttatttttcccttgcctccatttgaatgcaaaagatggcactattttgttctttgaattttttacttaatatcttggagatctttccatacaatacataaagcacatcttccagaagtgcatgatatttcactatatgactgtatcattatttatttaccaagtgtcctattaatgcatatttgtgctatttcagtcttctgttaacaaatattgctgctgtaaataagcttttgtgtgtgcaagtttatttacatgatacatgtccagaagtagaatttttggatcacaggatatatgcatttgtgattttgatatatattgccaagctgattttcatgtgcatgtgtcctgataattactatcactatgaatatatgaaagttcttgtagctttggcttaaaaagtatatatatacatatatatgtatatcttttttctctctctcattttataactcaagcaaaactgcagtttccagtgcagataaaggaatttctagacagactgattgaaattattaagcagttatcagaagaaggatctaatctttattcaattatctctccagatgtagcttatttatttatttatttttttgagacggattttcggtcttgttgcccaggctggaatgcaatggtgcaatcttggctcactgcaacctccgcctcccaggttcaagtaagatgtagcttattctctaacatttttttgtttctggagacttttcttggggaaattaaggtttagattaaggtagttagatagctatttattcttcaatttaagtgttatacgggcaaaagagccacctttgcctcaattcctgcccaaattgttattcaaagcaaacttaaacaccctttgtgttaatgtgagcattgtattattatttgctttgttttttcttaatttatcctagtttaacttttttcttccatgtgttctagctgtaataagattttaataatgtttaggtggccacgacaaccattttttttgaaatttgatttctaactcttgagatttttatgctttacagatatatgccattaagcttcctttttataaatatgttataaaatgagtgatgagttatagtgagagcttttagtttttcctgtgctcaaaacactcaaaacatatattttatgctagagcgagcatatgatcttggtttccttccttttttttcccccaaagaataacccctgtatactgatttcagacactgtataaagaaaaatgctttatattatttttcttaaaattatagttgattaattagtaacgtgaatcactgttaaatgatggtaagcatctcagtaaaacttgctgagagctctcctcctatatccagcttcagacttctctctccatacagtggttaaaacactcagagtcacatgccctacctgtgtgtatcacactgttgcaggggaaggtgcagtgccctggaatatgaagaaagtgagcatgagtcttgatatgctcccaggtaatagaaaggagacttangggaccttggtgctacacctgggtttgcccctgacttcttgtgtgctttgttttttcttttttttttttaacctctgtgggatatattatatatactttattttatttttggcaagagggttggggattgggagagtggagagtctaggtctttagaatgggggaatatagactgaaagtatttactctaagctaaatctgttcatagcatttggtcctcatgttctttctctattctgagaggccctccctgtaggggatcactgatgtgtatgtcatacctgctatgagctaacctcagtggggagtcttcaaggaagtctacagtgaacaactcagttctctaaaggaattgtgattttcctaagaactgcataggcgctttcctgatggtttgcatttccacattctaaaacagagcatggacagaggctctttactgtccttcactcctattcaagagcaaggttgttgccactggtgttatttccngtgtttaaaggcaaatagataaaaagaatggagaaggcctttcacacccaaagtgaaacgcgtcctcttctcatgcatcccncttcccctcctgacttcctcctctattattaatagcaccancatcctcctaatgacctagcctggaatctgcagaatcattcttgaccacgggtcctctctaggccacccacgttaaattgcttcagttcatctttttcttctgtttccctgaccaccagcctacattaggctcttgttaccacttaactgggcgcctgaaataagctcagcagctgagagagtcttgagccatttccattttcaaggctcctcgtatactaacagaaagaaagaatttcaagacaggattatggaaattcagtttgcttatatagtttaagaaattaatgcttttaatacacacaaaaatactgctatacattcatactatttacaagtaattacaaaatgtattaaaacattattcattttttggtaccacattccttgtggaacctgagtctacagctgaatggtgagcatctttcagtcctgttgccatgggcctctttgactgactgtgtagcctcacttggagatcaggttttttttatgaacacagggcttggccacatggcttctctgctcatgtttgcttaaaggctttacctaactgctcttttctctgccaggcttcctgttctcattcatcctatgtggttttgcaggattaagtttcttaaagcttagctataatgatgtgaaattgccattcagcaatctttaggggtctcagaaatgaagatacacactgttccttaaatattctgtccagctggtatttgtacctttcacctccattctgcacagtagtagcccttggctactcgtgcagtatgtgcatgctgtttcccaccattaagcaaccttcttaggaagtgttgagcaangctttgctcctgaagggaattgaaattcagaaattacacttcatagggaagtggctctgttttcatctgctcagccttatttcagaaagtcatggggagttagcactggagggatctcagattcctgcctgggctagggatttttgtttttttttaaacacacttcactggtggattccaaggtagaattcttggttttggcaacctgtgttctagactaacatcctcattttgttggataagacagccaggttcaaatagggaaatgaatttgtctcagggcagagggtcatgtcctgacctgtctgactacagattcagtgatctttgaactggagaatgtggccttacataataaatattaaccaagttgatgccatgataggcacaatatatattttatatatatatacacacaccaagagtggcacatttgtatctgaaagttatgcatctgattgccgagtgggtnaagtggcactctagactgtgaaagcctggaatgactgccttcagcatgcagaaacaggcttttcaactgtggcctcagcaaagattccccaggggttgtccattgagctattagagtcatagctgaaaattcacagcgtggcttgtgagttaagtctttagaaggagaccatcagcttgtattttgctttgattgtttattttagaattctggttgatttctagatttttctttccttatagaaaaatccttcacttctaaagaaactattttttgaatcactgcagtgctctaacgggctacacataggcgttggtaatctgggatgtaattcctcacccctggtggtgccgaacagacatggtttcattaatcaatgcctgagcttggtgacttgggctgagctcaggctcatgtagcactctgatggcgcattgggtaggggattgcattcagaacctttgcctaatggagcagcataagtgaggtcagctgtacagcttatctcatagacccaggttgggatcagagcagaaagccaagtggaaaggaagatagtgctctgccctgtccccttccctcctcttcctcctggttaaccgctctgacctgtcctctgttctcaacctaattttcacatcttcagggaggatttcctcagcctctcacaccaggtcaggcccctggctacatattcttatagtcctctgtgtttttctccatcgcaattaagacaataaacaatatattattatgtaggtgatgatgtgtgtgacctctgtcatccccaccagactctgcggggatgaagacttttctgattctctttacttggtaaattgctttagctccaggctgcagtctacccaagcatgctcctgcagccctcctgtgacattgcgatttaatagtgtcccctgctcaagggcacactgcatgaaggatttcctactcctgggctcctaggagtccacgaacacaacttaaatgcttcctgtggtgggtaaaacttgaagctgtattgcctcatgattaagctgagcatgtgaagagccaccagtcatgggtgtaagttctggctctactatttaactggctgtgtgaccttggcaattttctttacctcttgaagttttgacttattcaattattaaacaggaagaataatactggctacttcgtaggctgttgtgaaaatttgataaggcctgtgaaatatatgcagtatagtaagtgcaggtgatacaatttcttttacaacatttatttatttaaaatattaatgaataaatacataaatattttaaaagtctcaccgtgtctcccaggctagaatgcagtggtacaatcatagcttactacagcttcaaatgatcctccctcagcctcccaaagggctgggataacaggcatgaaccatggtgcccagcctctgtttttaattttgaaatgtcaacatggatttgatggtggtctctgatattgacttcttcaggattaagccctccatgacagggatgtattctaaactgtgtggacaggaggaagatgcatttgtttacaatggacagaagtaagaaaagtaagaaatgtcatagaactatgtctgggggtcaggtgacaagcactgtgtcatttctagccctgtgtcccctgcaggtgctttcttctgtggaccctctgctccttctgttgagggagaattttggatgagagctggataatttcccaaaattcgctcaactgtgaagctctggaactcaagttgctgtgctgcaaagctgtctgaggacaggccgtggtggcagagaggggcagggaagacaggcaatttggcatggagatgatgggcacatttgtcacatgacctgggtttgattcccagctgcatcgtatactaattgtgtgtcctagggcaaatgatttagtctctctaagcctcagaggccccaaaggaggaagaatgatgtaaatggcccagcaccatcctgggtgcgtggaaaactctaattatgataatgtcctggaacgttctgcagtgaacaagacagaccacattactgccttcgtgttgcctggtgatcagagtgattattgctggttttggggaaaacagcattctgaggcatggaacggttttcttccctgctctgtgatgcagggtgctcttgttgtgttcactcctgcaggtcacctgctccccagcagggtgacagtgaagtgtgagtgcagtggactgcacagtggcaaaggccacatgactcctgaatgcatcctgtggacaggccaagcgctgtgccctgtgtgaatcatcaggtgaactctcatacaattctagggtgtaagaactcctattacctcctgttttacagatgaggaaaccaaggtttatagggttaattaacttgcccaagataaagcagctgatgggtagtgaaggcaggagtcacacagcccgtgactgtntctgcccacttggccctcttctcaggctagagaacagctatgatgtccctgataaagtcacactgtggaaagtggaaagtatctgacttagatgtcctgcatctgctagatgtcctgcttgtgcctactacagcaactcagagagctgttaggtgacttatctgagataatgcgtgtaaagtgcttaagtgcttagcatggtgcctgtcacattgtcaacacttagtatgcncttgctgttactatgattatattacctgggccaaagaatgccacttcactctatccttcttcatagtggttatgttctaataatattttattacatttacagttaactctttaacaacatgggggttaggggtgctgtcccccagagttattgaaaactgcatataacttttgcattccccaaaatttaactaatagcctactgttgaccagagggcttacctgtaacgtacatagccaattaacaaatattttatatgttatatgtattatattccatatatacaataagtaagctagagaaaagaaaatgttataaggaaatcataaggaaaataggatgtatttactattcattaagtggaagtggatcatcataaaggtcttcattcttatgttggaacaggctaaggaagaggaggaagaggaggagttggtcttgctgttgtaggagtagcagaggtggaagagggggaggaagtggaaggggagacaggagaagtgggcacattcagggtaactttatgaaaatacattgtaatttctgtccttttttcatttccctagaaatgtttctatagaatagcaattcttccatcatttgctttagtttcagtgcctgtgtcatagaagcgtcagtgttgtaaaggaagtcttgaataattgcaattgccacccttctcctgaattgtctaatatcagtttgttttctagcactgcatctcccatgtcttctttcccatcgtctggtgctgttttagaagcactcgtctccatcaaatcatcttctgttaattcctctggtgtgtctattagctcttgactttatttaagatgcatatattgaaactatttacctgctcccaccctccacctttttgccatatccacaatctttttcttgatttccttgattggctaagtcatggatatggatactgtgaagtcatgcacaacatctggatacacttttctccagcaggaatttattgtttcaggcttgataactttcacagctttttctgtaacaacaatggcatcttcagtggtgtaattcttccagaccttcatgatgttctctctgttggggttctcttccaattcaatcctttccatagtgtatgtgtgtaatgagccttaaaggtccttatgacctcctgatttagagactgaattaaagatgtgtttgggggcaagtagaccacttcgatgcctttggtattgaattcatggggttctgggtggccagaggcattttcctatatcaaaagaactttgaaaggcagtcccttactggcaaagcacttcctgacttcaggaaaaaagcatcaatggaaccaatctggaaaaatagttctcattgtccagtccttcttattgtacagccaaaagactgacagctgatgtctatattttccctttaaggctcagggattagcagatttataggtaagggcagacctgaccatcaaccctactgcatttgcacagaacagtagagttagcctatcccttcttgccttaaatcctggtgcttgtttctcttccttactaataaacgtcctttgtgggatatatatatatatttttttttgttagaatggaacactttcatctgcattaaaaacctgttcaggcagatacattttcctctaggaatttatatgcagcctcttggttggcaggagctgcttcttctgttatcttgacatatttttaaagtttttaaaatttttaattcttaaaattaattaatttttggttttttagagacagcatcttgctctgtcaccaagctggagtacagtggcaccattatagctcactgtaacctcaaactccttggctcaaccagtcttctcacctcagccttctaagtagctaggactacagacatgtgccaaccatactcggctaatttttaaaacaatttttgatagagatggggatctcactgtgtttttcagactggtttcgaacacctggcctcaagaggtcctcccactttggcctcccaaaatgctgggattacaaacataagccaccgtgcctggtctatattggcattttaaaagccaaacctctttgtaaaattatcaaagcatcttttattggcattaaattctccaactttagattcttcaccttcttttttctttaagttgtcatataatgactttgctttttcttgaatcttagagtctagaatctattcttgctttatcttgaatattagagtctagaatcatattagagcaatcctgcacccacataaaagctgcattttcaatatgagataaaaggtatttcggaaaaagtgcaaggttttggcacttgctgtcatagctgcaatgacaaatggcttcacaaattttctttccctttttttttaacagtcatctttatgtgtcatttatcttgaaatgaagataattgaagctgcagacctcaatctatgacacatatcaagcaattcaactttttcttgtctggacttttctctgctttttgggagcactcccagatcactattagttctttgtatgggtccaatggtgttattcaaggtttatgatatcgtgctaaacatgatgaaaaacatatgagaactgcaagagatcactttttactgcaatgtgcaatttactggagaaactgcttacgtggagatgattagtgtcatgagaaatttaagcagatatttacaatacttgagcaacaggaggcggctacaaaattattacagtagtacacaataaactctagttaattttatgcagttatgatttaataccacatctttacatttgtttacatttctcttaactgtcaatggcaccatgtttggtctgtaagtgtgtgtctaagttttgaaaatgttaactttttatactttgtgtatatttatggtaataaataaaaaaggccaatatctaaatatattttatgcattcatgacatacttaaccttttagtaactttttattatttccagactacagagttggtctgttagtttttctcaaattgttgcaaatctccaacaaatttttcaatgtttattgaaaaaaaatccatgtatgagtggacctgtgcagttcaaacctgtgttgtttaaggaccaactgtatagatttattattgttactatcagggaccattatttattcagctttactatgtattaactacttcgtcattctcactttagaaaaggacacctatacttcagagagagttgagcaaatcctacaaagttttgtagccagtaagaactgaggtctgcttcatgctaacgccctggtgtctgaccacctccttgttctctgttttggttctgccctggccctcagctgatttctcacatgtgttttggagtgtgacggagtcctgtccggactcagcatcctggcagagaaggccagtgccttgggaggcaggaggaacttccccacctacccggtcatcttcctcctgcgggactgtgggctcagcacattcagtttcggagcttgagtaatcgcctcctggcttccacccacactgggaaggcagcgttgtcgtggactgccactgggctgcttctttgtcagctttgtcctatttagggccataatgaaatcacttgccatctccaggctgagaaatggtcctttagtcttttcccttaatccccagccctcctagggcttctttttcttcaagttgcatttgcacagaactcccagagccacccgtagggcatagctggggaaggcagcccttgacctgtcatgctggtttgtcactctgacaaacagggcttcagggtgcctgagtgcattgagcaggctgggccttggaggagctgcctgaccaggcgaggctgagtgggtgcccctcctttcattccctatccccctccatctactagagattactttcttcaagcactttgtccacatcctttcaaaaatagctttctgccttcagccggaaggcctcagtgtgttctagagacttctctcttgttaaccttctttccctagcaaagcactgaaaagcatggcctgtggtgtcagacacacctggttagactccaaccctcacgcttcctagctctcgttcagccttgggcaagttacttgacttctttaccacaattccctgttctgttaaatggcagtagtgccaacttcaaaggattttcagtacagtacctacagcatacaagcgtgcaatcggcgctagctatcatttcaatcagctgttctcagcaaggtgaagtgaaatctgaaatagttcactggaagatgtgaacagcaataggttttaccttcccagagagaaacatcctttgccagtcaatccttaaatccttctttggtggtgggatgggaaagaaccacattgtaccttcctttcttccccctggtgggagcaggtgagagaagctggcaacagttggctgggcctgcttccagcgtccagtcttttccattcccttttgtattcacccaatgccagagggaaggggcaagaggtttggaagccatttttaaaggtttttcacccgaggattcgatactattttctttgctgaggatccgtcatgcctaatggaactgccatctctagaagttcagtaagttatatcctctgcatctccctcctcagaagagacttttttgttctgggatgaaaggaaactggcccagcctggaaagatgtgcaccccatgaagtccttcctattccctgtgtccccaggtcagacaaggcactggacttttcctagtggttccccagcctggctgcgcgtcagaatcaggcagggaggctttcatgtgcacactggtcccatctggccaaggcctgggtgcagtgtcagctctttattcatctggctcctatgttttctccagaaccctttgtggaaacatctgtctcttacttagaatccaggtcaaatgtttgtcccactggccaagtaactttctccttcttctgggacttcctgagtggtgttctagccttcttcttgctgggttagacagtcatcgtgtgtctgactccctcgaggatggagctccctgtgggagggagtgtgggttacccatctttgcattcctagcatctattagtttggggcaaaagtaattgtggtttttgccattgcttttttattttgtggggggtgggggtaaatggaatccctctctgtcacccaggctagagtccagtggtgcgatcttggctgaccacaacttctacctcttgggttcaaacaattctcctgcctcagcctcctgagtaactgggattacaggcacccaccacgagggtttcaccatgctggccaggctggcctcaaactcttgacctcaggtgatccacccgcctcggcctcccaaaatgctgggattacaggcgtgagccaccgtgcccggcctgccattgctttttaagggcaaaaaccacaatgacttttgcaacaacctaatagcagtggctggtactcagtaggcaccactaaaggtttgcacgaaacgtaatgtatgttttcaaatcacttcttgatattttaccttctagtgcactgcttaagatacagcagatttccattaaaaacttttcacctgaatgtggaggacacagctgagtggcctccattctctaaagccatgccatttgtcagacgtttacctttcttcatcagcccttttcctcatctgccagcatttcccatgagaaaacagtgtggtctgcagtaccctttgcagtgcttggcccagattctccagatttgaaaacatttagcttgtaaagaatagattcactgtttccttcccatctgctgcatcttttgtgcctgttgttcattgagcttttgtattcagcttgaagtaggggatggaagaaccctaacaaacaaaaaaggacaattagaaaaatagtgtctttgacttattctctggaagcctccttcaaaggataaagtaattccctgagaaaagcgttgtgcaggtgtgaattcggtctgggtggaacaagggtatttaccgatgttcttagaagctgcacagccaccttaggcgtggtctcctgggtagcacatgctccagctgtccacaggccattcctttcttcacactcacctcccaggaaaactgcagcagctcctcattgcccttgggaatccaggagttatttattggggatgtttaaagactttcctgatgtatcttcaacttgtcagcttccacatttccccattcaaagctctagaggttacagagggaagtacagagactttagggaaattttaaacattctccatcgagagaaggtggggagctgagtcctggtcccatgtgctggccaacatctccccttccagcctctgtcntggcctggctgccacatatcaccctccttctcctctctcaattatccttgccccagggccctctttggtttcaaaccattcctgcctttctctggacactctcccctgaggagtagactaggcagtcccatgttttccgtgttaactacagaggcacagattggaacaagtgccaaggaattaggccacctaccgagccttcctcttgcctctntctgactctccatcctgagggaagacgattgcagtcgtttttgttggaaatgacctgacctgtgggagcagcccnttcctggcctttcaaagtcaagtcnccttactcatggcctagctcctgatcactcctggtgggtgaaaagtgcctcaacatacctaaagagctgtgacatgagcaggaaagcccctctttctagaaagtgttgggcaccatcagtacagcagagccactgcatcgtacagcgcccggtcaccattctcacgtacagttaccatgagatgatgatggtgcctgtagttacacatttttcaactataatttaatgataaattaattttggtaattataattgtcacttacactgcagtttataattttggatttttaatgatcaattttcatattttcccagctggattatcatcctcttcattgaagccaagaagcctgtgcataagacgctgtatctaccacaatgccttccacttacatttttcgtagtaaatttagtcttgttaatattgcattaaaatgaacctttgaaggcaaagatgagcacataaagcagccctaatcttgtccagtttgctttctattttctccccatgggtagaagttcacctgcatggccctggcatttctattttgtgattagaaaatcacaccagccatacatgatgtttcacttctgtaatccccgcactttgagaggccaaggcgagagaatcacttgaggccaggagtttgagaccagcctgggcaacatagtaagacctcatctctatgaaaagttttttaaaaaattggctggatgttgtggtacacacctgtaatcccagttcttcaggggcctgaggtgggaggatcacttgagtccaggagtttgaggctgcagtgagcagtcatgccactgnactccagtctaggtgatagaatgagaccttttctctcttaaaaaaaaaaaagttatgggaatcattttatactcttggcctggggtcctgctattttaacaacacganggtatagcacccccaggttgtacaactccagggagtaccatgtatattttcatgtatgtgagcagtgccttccggagtagtctacggaagctaccttgcagcagaactgtcatttaaaaacaatttgctagttatcaaatctatattaggacattagcagaaatgaacatttgtcaattcacttatagtcttatcatctggacaaatcattcttctcatttttccttggtattttacactcctctttggtgtacattaattttgcanagctgtaatttagagtagtctataattttgtattttgcttttttttcctttgcaaggtataagcttttctatgctgtcactgtccttgtcatggttgatggataattattataccaagtggatttcaatgaattatttgaccacttgacaattagcttatttccagtttttcactgttataaagaatgagcagagggcaaaggaagctctcatttgttcactgtgacccgtgtgtcagtcactatactggatacttacctcacttattcctcttaacaattatttttggaactgagacgcagactggttaagcaacttaatagtatgagttgatatatagtgaactcttactgtgtgtcagactctttgctacctacttttcatataatatctcatatctcactgtgtcctataaaatgtgtattatcatttctactcttcagggaattatattaattttaggagatgtttccccaaggtgtcatgttagaacttggagaggacagagttgagcctaggtttgtttgagctgtctaaaactcatgatcgggctgggcgtggtggctcacacctgtaaaccccgcactttgggaagccgaggtgggtggatcgcttgagtccaggagtttgagaccagcctgggaacatggtgaaacactgtctctacaaaaaacacaaaaattagctgggtgtgttggtgcacgcctgaaatcccaactactcaggaggttgagatggaaggatcacttgagcccagaaggtggaggttgctgtgagcagagatcacgccactgcactccatcctgggtcacagagcaacatcctatctcaatcaatcaatcaatcaaataagtggataaaactcatggtcagtataatgtcagctccatggaggtactttttttcctcttgtttttgttctctgctgtgttctcagtgctgagaagaaggcctggcacatagttggtactcaataaaggcttgtttcatgaataactgaatggtctcagcgttaggtaagcagcttgaggtcaggtttctttggctcccacatctttgttttttctgctatatcactgtctcgggtacaggtgagtagaaaataaattctcacaggcagacacagacacatatatttatgaatttgtgtgtgtgagcctttttatctatttaacttttantcagctttaaaaatttttattaaattttattttttaaagcagttttaagttcatagcaaaattgagtggaaggtacagagatttcccatacaccctctgcccccacactcccctgttatgaacatccctcacagagtggaattgtaattgttacagctgatgaacctacattcacacaaagtccgtagtttacattagggttcccttttttttttttttttgagactgagtctccctctgtcccctaggctggagtgcagcagtgcaatcttggctcactgcaacctctgcctcccgggttcaagcaattctcctgcctcagcttcctgaatagctgggattacaggtgtggggcaccacacccagctaccttttttgtatttttagtagagacagggtttcgccatgttggccaggctagtctcgaactactgacctcaagtgatccactcgcctcagcctcccaaagtgctgggattgcaggcatgaaccaccacacccggccactacagttcactcttgatgttgtatattctatagttttggacaaatgtatgatggcatgtgtctacctctatagtatcatgcagagtagtcttactgccctgaaaaatcctctttactctgtctatgaattccttcctccctcctaacccctggcaaccaggatcttttttactctctctatagttttgtcttttccagcatgtcatatagaatgcagcctttacagatcttggtaatatgtatttaaggttcctctacatctttttgtggcttgatagctcatttccttttagggctgagtaatactccattgtctggatgtagcacagtttagttatgcattcatttactggagcacatcttggttgcttctaaattttggcaattatgagtaaaactactatagacatctgtatgcaggtttttgtgtagatgtaagttttcaactcctttgggtaaaataccaaggaatgtgattgctggattatatggtaagagtatgtttagttttgtaagaaactgccaaacttttccagtgtggtgctaccagtttgcatttccaccagcaatgaatgagagttcctgttcctccacatcctcttcagcagttggtgttttcagcgtttttggatgttgctcattctgatacgtgtatagtgatgtctcattatgtgtgatctttttctttccttttgtttattttgttaggaattattgtgagaaatgcaattacgaaagcaaattgtaaaaacattttataagaaaaaaattgtaaaaacattttataatttcttaaaaatatattgatttttgtttttgctgcttacataagtgtgtcttgttagtggacatgcaaaaaatggtccagtttcactgctaccttgccagtgctgttttaaaaaaattctttactaacattatatgtgagtacatcactatgtcaatctttcaatttatttctagttcattatttncttatggatcttttacgaatgttctatttagcaagatatcatatttgttttgaagcttggtgctactgcctcctaaacaatgaatgtttttcaggtcccaaaccagttgtcttcctgcaacatggcttgctggcagattctagtaactgggtcacaaaccttgccaacagcagcctgggcttcattcttgctgatgctggttttgacgtgtggatgggcaacagcagaggaaatacctggtctcggaaacataagacactctcagtttctcaggatgaattctgggctttcaggtatatatgaattgataatggcatggatgtatttccttagtactcttaaagcagacaacaggcttccagcagaagaggtagataggtggtaactctgaagttgtatgagaggggaagttagtgtcttttgaaaggttttaaatgttgctaggaatttaatgactagcagtaaggtaaattataagtaaatgattacattaagatttacatttagttaggaattcttaagttacttcggcatttctggtggtgtgggtgctgctgggtaaacgttattccataactttcctcctttctccataaatatgtaatccagatgttcacttttcttctttccagaaattatcctttcctccctcttccttctggctccaccagttaattgctgtatgncattggacatcttacataagcctcctgtgtctcggtttccttatttgtaaaatggagcgtaataaacacctacctcataaggtcactgggggcttaaaggagagggtgcagagaaggaacctccacagaacctggcaccttgtatgaactggctaggggttggctcttctcctgccagtggcaacatgcgcatgcatatacccatacgcacacttgggttttggtctatgttttggtaccaggtattagagaaagtcagcagcactatagcagcctccgggcttgcttcccatttttaaaaccagaggcacctctaaggacatgaaacacaagaatgagagcttttaacaaaaggcatatacaagaattggtttattgtcacgctatttgtaacaacggaaaacaggaaactacccaaatgcatgtcagcagtgaatggataaagtgttgtatatttatatagtagaataagaatgaacaacttacaattatatgcagcaaaaaatggattaagccagatacaggagaatacacattgtataattctacttacagaaatatttaaaaacaggcgaaactaatttctggtgtgaaaaatgaggacaatagttacttttgggagacacaactggaagagagcccaagggggcttctgcagtcctgctggtgttgtttcctggactcactgctggttttcccagctgtgtttagtttgtgataactcatcaaactgcatactcagtatgtgtgtgctctattttatgtactatttcaatgaaagagttcctttcttggattacagttatgatgagatggcaaaatatgacctaccagcttccattaacttcattctgaataaaactggccaagaacaagtgtattatgtgggtcattctcaaggcaccactataggtatgtatgtaaataagatcagaagttgatataaattcttcattacagagtttgtacttttcttaaaagtgaaatataaaaagatgttagttcaaattccatttatttttaaatgccaaacagaaataatgaataagataaggaatgttggtaacatttagtcttctatgaaaattcatgtatatggttgaaattgaagaaattaatgtaagccacaatatattacatgttttcctagatgaagcaagatagggatgtgagagagtagaaaacaagtagtttctaagttcagagacttacataaagaaaacaagaaaatatactgccttctgaagttaagtggaatataactaactacaggtacatttggtttacaaaaaattttgaaaagttatatgcattttaatttatgctgattatataagtaatgcatgttcactgtagaaaaacagaagaacagaagatttagcaaaattaaagaaaataaaaattgcccataattctagtcagcaagagtttttgtaattagggactaggaacctgtcctataatttatttaattctcccttttaatgtttactatgactaacaccttagtgttcccatcacatgctttccttacaatatattcctagaaggagccttactatatgaaaggtatgaatgttttgaagggtctcaaaacatgtggttatattgccaggaaaaaaatggagttaggcatttttctttatttatatttcttctttcatgacttgcctgcttgggacctttgccccactgcttcctaaagtgacattctggggccaggtggcaagacgtcagagagggttgtattaattcgttttcatgccactactaaagacatacccgagactgggcaatttataaagaaaaagaggtttaatggactcacagtttaatggattgtgagctagggaggccttacaataatgacggaagagcaaggaacatcttacatggtggcagacaagagagagtgagagccaagtgagggagtttccccttataaaaccatcaaatctcaagagacttactcactaccacaagaacagtatggggggaaccgcctccgtgattcaattatctcccaccaggtccctcccacaacacatgggaattatgggaactacaattaaagatgagatttgggtgggaacacacccaaaccatatcaagggttaaaatatattttaaagctaggggattctaaatgtgtgagttcctttgaaatcattggtggtttatttcaacgtggtgtctgtaaattgttctttgggggaggggcatgggggagataaaggtgatggggtgaggctcttggaaatagtctgttatttacattgtaaaaggaactgggaagattttctgattctcccagactggatttcttccagtgcttatctaggttgagatttggagcaagcattaacaaatgcttgatttactagtttaaccaaattcagtgttagggcacacggaagttcagagtgccccatgtcaagtgttttggctcctgctggtggtattgtttgcgtgggtctcaggcctccgcgagagggcgtcgcgagtgacggcctttgtgttttctgagaaggaaatcccagatgatggaattcctgttttctgtcctttgttctnacaggttttatagcattttcacagatccctgagctggctaaaaggattaaaatgttttttgccctgggtcctgtggcttccgtcgccttctgtactagccctatggccaaattaggacgattaccagatcatctcattaaggtacttggacccctcccatccctctcctctccccgcagatttcctcctgagatctgaagaantggcaaggggagggataatctgtgccttcctcccctgcgttttgatatcagtggagcagtgggcttttctttttccgtttacccctccttccagacccaggggtggccggggacgcctgtcgtttcctgcacactggtgccacgtgtactcatggttagcatgtgtcagtacagctctgcccacctcacagggagagcaaggagagtctgggagaaaataatttaagcatttgtggagttgccctttatcccatgaggtgagcctgtgcacagaggatgtaggagatgggagataggaaatgttcccaaaagcccatccctagctacactgagggtgacctaacaacgctatcattattgtattttataatatggctcctaaacacagccagtagcttcatcagggctctgccctaaagctgtggcacccgaacctctgttcagggaggaaatagatttcatgaaaaagagttttaagctaggtaagaccagatgttctattatgcatgcattatatgtcttttatgaaatatatgttcacacacacacatatgaaatcctgtatagaaatatatacatgaaatgaggtataacgtctctcatgggccatttagaagacttaaataggaaagatggaatctcctaggcttaggcagtccttctgccttggcctctcaaagtgctgggattacaggcatgagctaccatgcctggccaataaaaaaaattttaaaaaacaaaataaaaaagcaagcgatgggctggatttggcctgctggccagtagcattgaattagatgggcacacctctggcagacattactgatcaatcacagccttgactgtttcttagaagtaaccaccgatccatcagagtcagatgaaaattacttggggatggccctgggaggggtgatcattaaggccctttcccactgtagaagtccgctgaaaacttatttgattttctgcctccttctcttcatttggagaatttaaatacacctctgtagtgtgtgatttttgctttggtaaacttgtgcaaaagcatcctgatttgatgtccactggttgccattctctcctgaggccattcgtggagacattgggtacttgtctctgcttctgaggtgagtcacggagacttatgcaccagantgaaatgctgagatgttcttgggtttctttttattttgtaggacttatttggagacaaagaatttcttccccagagtgcgtttttgaagtggctgggtacccacgtttgcactcatgtcatactgaaggagctctgtggaaatctctgttttcttctgtgtggatttaatgagagaaatttaaatatggtatgcatgtttatagtaagatttgatttttttttttatctgtgaatgtgcttatttgtgttgaatgatatgggagaggtgggaatgacctcatcagaactctaaagagtctttcatttgagaggcacaagcatgaactttggccaatgcctagaatacggtaccacctgctgccatcctcaggctgactgtggtcaccttcttatgttgtacctagatggagattattgaatgaggagatctgtcacaaattaagctgtaatatttataattactctagtgatttgtttcttttagaaatcattataagtataaacataaagatgggaacaatagacagtggggactccaaaaggaaggagggagagggacaagggctgaagcctgttgagtactatagccaatattgagtactgtggttatgggatcaatagaagcccgcatctcagcatcatgcaatccacccttgtaacaaacctgcacatggaccccccgaatctaaaatacacaaattttcaaaaattactataagtatttaaatttggaacggccatttacatacacataagtgtatgcttgcagtgtgtgtgtatttataaaagtacattttataaaatgtaaacccattttattttataaaatataaacccttggccaatactatgcccgtgtttctaaatatgtttgttagtttgtcatgtggcattttgaaaaaaagggttaaaatcctggaataaaggccctaaggaatttcagtgccatttttcttttgtctgataattaaagcaaggtgtgattgttatatgaaatttgggaaattcaggaaagcatgaagaacaaaatgaaaatgccctgtaaacgaaacccacacagtcccgtgcttaccatgttgttgcacctccttcatatggactttgtatgtggttgtatgtatttttatagggcagatttttagtcaaataatttttttctacctctcatctcacatacttgagattatggctctagtttttagtgctttgaagggcaaaatacaatgtttattatcaatgccaccttaatgctgttttcattcttcatttcaatgtatttattttgcagtctagagtggatgtatatacaacacattctcctgctggaacttctgtgcaaaacatgttacactggagccaggtaggcattccaggagtgcatttggggttcatgtaaaatcaacatcagaaaggtctgggcatgcaaaccctttccaaatagaaagacaacctgcttacaaatctgatctggttttcttccccagagtcctgggtttttgtcatcgtgcttgtgttgcttttgatacctgtggtggggcacactgtgttatacgtgggttcacaaacagctactggggttgacatttttcttttccctcctctcccttcctcaagtctcaggttaatatattctctccctttccttctcccccagctttcttttcctcctcctgtttcctcccctccatctgcttctcattgagtcctagattttttttatttctgtgttgcttcataaagagtgattttaagtccgttttggagatagaaaccgctgtttcaacactaacccctgatcacaatatgcttggaatagcagtgaataaactggagctaaaccaatgatagatgtgaatgggggcccctgacttttgaaatacagttttgattattttatcatgtaaataagtcatgttcattctagaaaatttagaaactacatctagaaaaaaattatcttaaaatgaaaataaaatcattctataaccctagacagagaggaaatgcatatccatagatattgaatgtctctgcattctattctatacctcttttcaaaaagatgctgttaaagacatggatagaaatagtagatgtagaaatagattgatttttctcctgcttactgttttacagcttgcttttcttttttcacctgacaatatgtcagggacttctttctacctcaggacataattttgtgccatttatttttcagctaacttcatttttaatatgaaacaactcaccatttaagccctaaaccaagacactgtaggtgtcttgaatagtaatttccaaacacctggcagtcactgcttgcatcagaatcaccaaattgctttaaaaagtacactatttaataaatcattgcattaaaaaagtaatgagagttggaattatagtggaattctataaaacaaatactcctgtgtcccaatcatttggactagagaatctgtacttttattttttcgttttattttatttttttgagatggactctcactctgttgccaggctggagtgtagtggtgcgatcttggctcactgcaacctccgcctcccagcttcatgtgattctcctgcctcagcctcccgagtcgttttattattttaaaaaaaaattttttattgaggtataagtgacatagaatatttaaagtatacaatttgatatatttcagtgtttgtatacacctgtgaaaccatcaccataatcgacacagcaaatatatcatcatcctaaaaggtccctgctgcccctttgtgatacctccccccatccctcccctcaatcccactgatctgcttcctgtcattgtagcttagtttgcattttctagagcttgcatgagaacagtcatgcagtttatacttgtttttgtctggcttcttccactcagaatacttgttttgaaattttcctatgttgtgtatgtcagtagttcattcctttttatttctgaggatctgcatttttaaaaaatctgcctggtagattcttttgctccaccaggtttgggagcagacctgttcgggacatcctgatactttcatctccttcttcagttgccccaggaactctaacagtgctatagttctcctttccctggggctcgtctctaaggaactaggaagagcctggcctgaggctcctggtcctttatagtaactagaaggctgagagttaaatgtcagttcctcaggggcagagtttgttgtggcctaaaagaggggcatctggaatgcaaatagttcatgacgtgctgaacagcacatgcttaccacttaaggaatgcccccaaaccttcaaaaatcctcaaattcacaaagattgaggattttcgttcttggttcaggtctctgcttttctccttggtcacatttatgcttatagtcacttgttttcttcatataccctgtcactagaattcccctacatttttgaggatgcctaggacctcttacctaatggacattttcctaaaaggcccaatgtctgtcacctcatcagttattgcacccccagagatgatggagggtgactgagctggctggaggcagatcctgagctttcccaccagcttagtgactgccagcagcccacacacagtacacgccaggcctcagcaaagtacaaatggccaccagacctgggatgtcagaggcccttgggaatgttgaaaccaaggctgtcctaggccaactctattttatattacagacctgtgttgcttcacccttctgtgtcttgggcctccactgggcatggggtttgcagtagagacattggatcggctatcatctaggctactggtcttgttccagccctcttatccagcagcttgccagggtcaaaggctgcagggtgagggccagagcactgctctgtgccccatttgtgacctggtgactttagattctaactaccctggaatatacctccagaatatttgcaaagcccagatttgctgtacaaggcagcctgggcctttgctcttctacccgctgtaccatcttttgtcagtaaaatggttggttgctttgtgcagccattgtatcggatcttccctttggctttccctcctctgggctgttggccaggggctgccactggtgcaggctgcaggctccaagaggcagtgcaggaaaaggcttctgtggaagctgggcaggcctggatgccgggcaggctggggctagaattcaggtgtggcattagagggctcttatggtatgagtttggggttgaccttaaaggccattttgtttacagtccattcagaagtttactttttgtttaaataattaggattaacttgttaataaattccataccttgttctttagcgggattttaaatatagcatactcatctttccattctccttataaacctgatgaatttcggagctccccagagccaagacttgatattacttctcactttctcactggccctgcccagagcccaggtactctcacctgtttgaagaaggccatcccagtgtagttttccagtgttgttctgacctacctaaggtgctattaaaaatactggttcttgggcctgtctgagacctgtggagactctgaattcctagggctgtgaccctgggatctatgtttgagttaagtgccttagatgattacgatgtgctcttttttttttctttaaaggaaaaaacatacttttggtaggcttttaaagaacactgtaaaaaggatattcagtataatttttgttaaacatgtaatatgttttatgaaattttagaaaatacatgagtgaaagaaaaatgacttgtatgtctagcacccagcaatagccactattaatattttggtataatcttacagttttgtaatataatcatttccattacaaaagtcagatcatactacatctgcttttatgtaaattttcatttaaagaaatgccattatatttgttagatacaagttaagctgttgtattagagaccccaaaatacagctgctaaataaagagtttatttctttctcataataaagttcagagagaggtggcccagactgatgatagagggggttttggctgtgttccatgaggccatgcagggacccagttccctccatactatagctctgccatcctcggggtgttgtcctcttctgcctggttgcagcccggtcacctccatgtctcttccaactcacaggaaggcaggggagagggagctcagggcaagtgactttgtgcgaaggagatagcttagaagtgagcggtatggccatagcctggctgctcgcaggaggatgaggatgtggtttctatcttggcagccatgtacttagggaaagctttagggattctgttactgaaaggaagaaggcaagaatgggaatgggtggcagtctctgccataattaaaaatgcctttccgggtcagtaactaaagttttaaaatatttgtcataaagggcagtttctgttgcttgaattttattatcattttgttttttgcagtgatagttgttttgcagtcataaatcatctgtccttatatgttagagtgttttcttaggatgatacatttatagcagtagacttagtaagggagagggtaggcatagctttaagacttctaatacatattgtactttagaaaagttgaacccgtttacatttttattaccattcaagacctaaatataatttttaaatgtcattttaaaacggtttatcctaatactataggcatttcctcctgatcattatctacatatactctgtgatatgattatcacagaagtataaccttagtgtatatttggtttcatttttttccacttagtattatttatgagattatctgtaagccattttctgtttgtattttatttatatttatgacagtggcataccccttgtgtatatttatgtaacatatttacccaaatatctattatttgaaatggtaagttttggccacaaggtggcgcccggtaaaaagaaatgcccagacattctcttcaaaactgcttttggtttatgtgaagtctgttcttatcaactgcatacaattctactgtttgatgtaataaaacacagagcgagatgatatactacaagggattgttacttattaaaattgggctttagcttatttccaggtttttgttactggaaatcatcttaatacttttcttttgaaatatcctttcaagtggatagcttgaagtcctaagtgacttagcacaaagtcaaatttagaacttcagtctgagctataggcaagtttcacctttgtattctgtgctcacgctggtgcttcatatgaatgctgaaggacatgtgacaaagtgatgaactgctgtctgtgttcagtggcagaatagtttgcatcaatatattttcactgacaaagatggggaacagatgtaccaacaggtgctgtgaatccaaattttgttttgcttgttaaatatgccacaggtatttaatatcagtcatttgcaacggcaaaaacagatgccaaatatttctcctgtaacaatcccctatagtatatcatctcactctgtcttttattacatcaaacagtagaattgtatgcagttgattagaacagacttcacataaatcaaaagcagttttgacaaagaatgtctgagcatttctttttaccaggcgccaccttgtggccaaaacttaccatttcaaattcatttggcttgccaattttgtgtttaatttttgacatacatttaatttgagagtgtagaggaaatatggatttgcactattttgaattttaaaaataagtgacattttgctaatattttatattatactattttaaatatgaataaatgtaaatttcaatacaatttcaatttcatggctctagtatccctaactagttagaattgtgctggcatgcagtactacttggtgattatactgataccagtactcaagaaaaagtgtttaatcaataccatcattaaaatttgactaatataactagacaagtagaatgggtaaatagaaaatatacagtcatccctcaagtatctttggggactggctgcagacatcatccccaaaccaaaattcacagatactcaagtcccttatataaaatgatgtagtatttgcatatagcctatgcatatcctttcatatgctttaaatcatctctagattacttatgatgcttaatacaatgtaaacgctatgtaagtaggtgttacactgttttaaaatttgtattttttattgttttattatcttttattgtttttttccaaatattttccatctgcaaaatatcacttggctgaatccacagatacaaaactggatatggagggccaattgtatattataattattttatctatatatatccatctctctctctctctctctattatatatatatatatgtatatatatatgtagctacctatctgtctacctttatttcccaagtaaaatgactaactctttgaaaaagcttaggatgcaaatttcagcagaaaatgtcagcataaagttccgctagcaggagcaactgttgatctagtataattgacagcatatgtgcatagctgctttcttgtgtcaggtggtagctgcttaacaatcatacaatgagaaattgagtcattcagtaaagcaggacaaaaccatgccatctcatttaaaataatgccttggaaatgaagagtaaatctggatattggtataaagttgatttccgaggttgtggctagctccagcaacctatgatgttatctctaactttggtgtcagataactcttttccaaattatcttctttttaggctgttaaattccaaaagtttcaagcctttgactggggaagcagtgccaagaattattttcattacaaccaggtaaagtttttagtcttttcattaaagggggccctgaaaactcatnaagaaagccagcctggcctatcaggattctggccaggctcaggtgctgtgggaaatgtttgcaggagttgactagtgtttgttttccatcagtccattcagaacaatccaagctttgtagctggtgttgtggactgggcctcctctctttgtcctttccccagctctaaataagaatcatcactgttatgcattactcagagtaatcacgaacatagcctgtagagtcagacagtcctatgtctgttatctggtagctatggggccttggccagattacattgcttaagcctcttccctgcactaataaaattagcatttttgagcatgctaaatgcactgaagtgtgaggcactttgctctgttttttaaatttaattcccagagcatctctgtgatgtaaacgtgattatctctgacttaaacatgaggacagtgaggcttagagaatttctgtgacttgtcttacacccaaagggaagaagtaggagggcatgaccccaaactctttccagccactattgccttgagtgtactacctatggagtacaacaccttccttgccggggattaaacattcattttggtgcccagcctacggcagcagctccacagctagtggcgattataattagcattctctcatttggggttagatttctttttttgtgccggtaatggcaacttgaaaagatactcaaagagattttaaaaatttagtctgttagtcaaacttactagacaatgtttaatggagattgcgcttattgtgattttgaaaattaaaacaacaacaacaacgaggctttctctggttccttttcattgtagagttatcctcccacatacaatgtgaaggacatgcttgtgccgactgcagtctggagcgggggtcacgactggcttgcagatgtctacgacgtcaatatcttactgactcagatcaccaacttggtgttccatgagagcattccggaatgggagcatcttgacttcatttggggcctggatgccccttggaggctttataataaaattattaatctaatgaggaaatatcagtgaaagctggacttgagctgtgtaccaccaagtcaatgattatgtcatgtgaaaatgtgtttgcttcatttctgtaaaacacttgtttttctttcccaggtcttttgtttttttatatccaagaaaatgataactttgaagatgcccagttcactctagtttcaattagaaacatactagctattttttctttaattagggctggaataggaagccagtgtctcaaccatagtattgtctctttaagtcttttaaatatcactgatgtgtaaaaaggtcattatatccattctgtttttaaaatttaaaatatattgactttttgcccttcataggacaaagtaatatatgtgttggaattttaaaattgtgttgtcattggtaaatctgtcactgacttaagcgaggtataaaagtacgcagttttcatgtccttgccttaaagagctctctagtctaacggtcttgtagttagagatctaaatgacattttatcatgttttcctgcagcaggtgcatagtcaaatccagaaatatcacagctgtgccagtaataaggatgctaacaattaattttatcaaacctaactgtgacagctgtgatttgacacgttttaattgctcaggttaaatgaaatagttttccggcgtcttcaaaaacaaattgcactgataaaacaaaaacaaaagtatgttttaaatgctttgaagactgatacactcaaccatctatattcatgagctctcaatttcatggcaggccatagttctacttatctgagaagcaaatccctgtggagactataccactattttttctgagattaatgtactcttggagcccgctactgtcgttattgatcacatctgtgtgaagccaaagccccgtggttgcccatgagaagtgtcctngttcattttcacccaaatgaagtgtgaacgtgatgttttcggatgcaaactcagctcagggattcattttgtgtcttagttttatatgcatccttatttttaatacacctgcttcacgtccctatgttgggaagtccatatttgtctgcttttcttgcagcatcatttccttacaatactgtcnggtggacaaaatgacaattgatatgtttttctgatataattactttagctgcactaacagtacaatgcttgttaatggttaatataggcagggcgaatactactttgtaacttttaaagtcttaaacttttcaataaaattgagtgagacttataggccc

SEQ ID NO: 469 - DNA, 720 bp, Homo sapiens
  allele 30,57,85,243,250,377,512,531,555,561,672: N is any
cctgcgagctccgtcctgcctgcagcagcncaaccctgcacacccaccatggatgtnttcaagaagggcttctccatcgccaagnagggcgtggtgggtgcggtggaaaagaccaagcagggggtgacggaagcagctgagaagaccaaggagggggtcatgtatgtgggagccaagaccaaggagaatgttgtacagagcgtgacctcagtggccgagaagaccaaggagcaggccaacgcngtgagcnaggctgtggtgagcagcgtcaacactgtggccaccaagaccgtggaggaggcggagaacatcgcggtcacctccggggtggtgcgcaaggaggacttgaggccatctgccccccaacaggagggtgnggcatccaaagagaaagaggaagtggcagaggaggcccagagtgggggagactagagggctacaggccagcgtggatgacctgaagagcgctcctctgccttggacaccatcccctcctagcacaaggagtgccngccttgagtgacatgcggntgcccacgctcctgccctcgtctncctggncacccttggcctgtccacctgtgctgctgcaccaacctcactgccctccctcggccccacccaccctctggtccttctgaccccacttatgctgctgtgaatttttttttvaaatgattccaaataaaacttgagcccactcctaaaaaaaaaaaaaaa

SEQ ID NO: 470 - DNA, 3279 bp, Homo sapiens
ccggctdgaagcgcaacgaggaagcgtttgcggtgatcccggcgactgcgctggctaatgcggtaccggctagcgtggcttctgcaccccgcactgcccagcaccttccgctcagtcctcggcgcccgcctgccgcctccggagcgcctgtgtggtttccaaaaaaagacttacagcaaaatgaataatccagccatcaagagaataggaaatcacattaccaagtctcctgaagacaagcgagaatatcgagggctagagctggccaatggtatcaaagtacttcttatgagtgatcccaccacggataagtcatcagcagcacttgatgtgcacataggttcattgtcggatcctccaaatattgctggcttaagtcatttttgtgaacatatgctttttttgggaacaaagaaataccctaaagaaaatgaatacagccagtttctcagtgagcatgcaggaagttcaaatgcctttactagtggagagcataccaattactattttgatgtttctcatgaacacctagaaggtgccctagacaggtttgcacagttttttctgtgccccttgttcgatgaaagttgcaaagacagagaggtgaatgcagttgattcagaacatgagaagaatgtgatgaatgatgcctggagactctttcaattggaaaaagctacagggaatcctaaacaccccttcagtaaatttgggacaggtaacaaatatactctggagactagaccaaaccaagaaggcattgatgtaagacaagagctactgaaattccattctgcttactattcatccaacttaatggctgtttgtgttttaggtcgagaatctttagatgacttgactaatctggtggtaaagttattttctgaagtagagaacaaaaatgttccattgccagaatttcctgaacaccctttccaagaagaacatcttaaacaactttacaaaatagtacccattaaagatattaggaatctctatgtgacatttcccatacctgaccttcagaaatactacaaatcaaatcctggtcattatcttggtcatctcattgggcatgaaggtcctggaagtctgttatcagaacttaagtcaaagggctgggttaatactcttgttggtgggcagaaggaaggagcccgaggttttatgttttttatcattaatgtggacttgaccgaggaaggattattacatgttgaagatataattttgcacatgtttcaatacattcagaagttacgtgcagaaggacctcaagaatgggttttccaagagtgcaaggacttgaatgctgttgcttttaggtttaaagacaaagagaggccacggggctatacatctaagattgcaggaatattgcattattatcccctagaagaggtgctcacagcggaatatttactggaagaatttagacctgacttaatagagatggttctcgataaactcagaccagaaaatgtccgggttgccatagtttctaaatcttttgaaggaaaaactgatcgcacagaagagtggtatggaacccagtacaaacaagaagctataccggatgaagtcatcaagaaatggcaaaatgctgacctgaatgggaaatttaaacttcctacaaagaatgaatttattcctacgaattttgagattttaccgttagaaaaagaggcgacaccataccctgctcttattaaggatacagtcatgagcaaactttggttcaaacaagatgataagaaaaaaaagccgaaggcttgtctcaactttgaatttttcagcccatttgcttatgtggaccccttgcactgtaacatggcctatttgtaccttgagctcctcaaagactcactcaacgagtatgcatatgcagcagagctagcaggcttgagctatgatctccaaaataccatctatgggatgtatctttcagtgaaaggttacaatgacaagcagccaattttactaaagaagattattgagaaaatggctacctttgagattgatgaaaaaagatttgaaattatcaaagaagcatatatgcgatctcttaacaatttccgggctgaacagcctcaccagcatgccatgtactacctccgcttgctgatgactgaagtggcctggactaaagatgagttaaaagaagctctggatgatgtaacccttcctcgccttaaggccttcatacctcagctcctgtcacggctgcacattgaagcccttctccatggaaacataacaaagcaggctgcattaggaattatgcagatggttgaagacaccctcattgaacatgctcataccaaacctctccttccaagtcagctggttcggtatagagaagttcagctccctgacagaggatggtttgtttatcagcagagaaatgaagttcacaataactgtggcatcgagatatactaccaaacagacatgcaaagcacctcagagaatatgtttctggagctcttctgtcagattatctcggaaccttgcttcaacaccctgcgcaccaaggagcagttgggctatatcgtcttcagcgggccacgtcgagctaatggcatacagagcttgagattcatcatccagtcagaaaagccacctcactacctagaaagcagagtggaagctttcttaattaccatggaaaagtccatagaggacatgacagaagaggccttccaaaaacacattcaggcattagcaattcgtcgactagacaaaccaaagaagctatctgctgagtgtgctaaatactggggagaaatcatctcccagcaatataattttgacagagataacactgaggttgcatatttaaagacacttaccaaggaagatatcatcaaattctacaaggaaatgttggcagtagatgctccaaggagacataaggtatccgtccatgttcttgccagggaaatggattcttgtcctgttgttggagagttcccatgtcaaaatgacataaatttgtcacaagcaccagccttgccacaacctgaagtgattcagaacatgaccgaattcaagcgtggtctgccactgtttccccttgtgaaaccacatattaacttcatggctgcaaaactctgaagattccccatgcatgggaaagtgcaagtggatgcattcctgagtcttccagagcctaagaaaatcatcttggccactttaatagtttctgattcactattagagaaacaaacaaaaaattgtcaaatgtcattatgtagaaatattataaatccaaagtaa

SEQ ID NO: 471 - DNA, 4910 bp, Homo sapiens
  CDS (143)...(3313): Nucleic acid sequence encoding KNSL1
acctgcgtgcgtcggtcctccaggccacgccagcgcccgagagggaccagggagactccggcccctgtcggccgccaagcccctccgcccctcacagcgcccaggtccgcggccgggccttgattttttggcggggaccgtcatggcgtcgcagccaaattcgtctgcgaagaagaaagaggagaaggggaagaacatccaggtggtggtgagatgcagaccatttaatttggcagagcggaaagctagcgcccattcaatagtagaatgtgatcctgtacgaaaagaagttagtgtacgaactggaggattggctgacaagagctcaaggaaaacatacacttttgatatggtgtttggagcatctactaaacagattgatgtttaccgaagtgttgtttgtccaattctggatgaagttattatgggctataattgcactatctttgcgtatggccaaactggcactggaaaaacttttacaatggaaggtgaaaggtcacctaatgaagagtatacctgggaagaggatcccttggctggtataattccacgtacccttcatcaaatttttgagaaacttactgataatggtactgaattttcagtcaaagtgtctctgttggagatctataatgaagagctttttgatcttcttaatccatcatctgatgtttctgagagactacagatgtttgatgatccccgtaacaagagaggagtgataattaaaggtttagaagaaattacagtacacaacaaggatgaagtctatcaaattttagaaaagggggcagcaaaaaggacaactgcagctactctgatgaatgcatactctagtcgttcccactcagttttctctgttacaatacatatgaaagaaactacgattgatggagaagagcttgttaaaatcggaaagttgaacttggttgatcttgcaggaagtgaaaacattggccgttctggagctgttgataagagagctcgggaagctggaaatataaatcaatccctgttgactttgggaagggtcattactgcccttgtagaaagaacacctcatgttccttatcgagaatctaaactaactagaatcctccaggattctcttggagggcgtacaagaacatctataattgcaacaatttctcctgcatctctcaatcttgaggaaactctgagtacattggaatatgctcatagagcaaagaacatattgaataagcctgaagtgaatcagaaactcaccaaaaaagctcttattaaggagtatacggaggagatagaacgtttaaaacgagatcttgctgcagcccgtgagaaaaatggagtgtatatttctgaagaaaattttagagtcatgagtggaaaattaactgttcaagaagagcagattgtagaattgattgaaaaaattggtgctgttgaggaggagctgaatagggttacagagttgtttatggataataaaaatgaacttgaccagtgtaaatctgacctgcaaaataaaacacaagaacttgaaaccactcaaaaacatttgcaagaaactaaattacaacttgttaaagaagaatatatcacatcagctttggaaagtactgaggagaaacttcatgatgctgccagcaagctgcttaacacagttgaagaaactacaaaagatgtatctggtctccattccaaactggatcgtaagaaggcagttgaccaacacaatgcagaagctcaggatatttttggcaaaaacctgaatagtctgtttaataatatggaagaattaattaaggatggcagctcaaagcaaaaggccatgctagaagtacataagaccttatttggtaatctgctgtcttccagtgtctctgcattagataccattactacagtagcacttggatctctcacatctattccagaaaatgtgtctactcatgtttctcagatttttaatatgatactaaaagaacaatcattagcagcagaaagtaaaactgtactacaggaattgattaatgtactcaagactgatcttctaagttcactggaaatgattttatccccaactgtggtgtctatactgaaaatcaatagtcaactaaagcatattttcaagacttcattgacagtggccgataagatagaagatcaaaaaaaggaactagatggctttctcagtatactgtgtaacaatctacatgaactacaagaaaataccatttgttccttggttgagtcacaaaagcaatgtggaaacctaactgaagacctgaagacaataaagcagacccattcccaggaactttgcaagttaatgaatctttggacagagagattctgtgctttggaggaaaagtgtgaaaatatacagaaaccacttagtagtgtccaggaaaatatacagcagaaatctaaggatatagtcaacaaaatgacttttcacagtcaaaaattttgtgctgattctgatggcttctcacaggaactcagaaattttaaccaagaaggtacaaaattggttgaagaatctgtgaaacactctgataaactcaatggcaacctggaaaaaatatctcaagagactgaacagagatgtgaatctctgaacacaagaacagtttatttttctgaacagtgggtatcttccttaaatgaaagggaacaggaacttcacaacttattggaggttgtaagccaatgttgtgaggcttcaagttcagacatcactgagaaatcagatggadgtaaggcagctcatgagaaacagcataacatttttcttgatcagatgactattgatgaagataaattgatagcacaaaatctagaacttaatgaaaccataaaaattggtttgactaagcttaattgctttctggaacaggatctgaaactggatatcccaacaggtacgacaccacagaggaaaagttatttatacccatcaacactggtaagaactgaaccacgtgaacatctccttgatcagctgaaaaggaaacagcctgagctgttaatgatgctaaactgttcagaaaacaacaaagaagagacaattccggatgtggatgtagaagaggcagttctggggcagtatactgaagaacctctaagtcaagagccatctgtagatgctggtgtggattgttcatcaattggcggggttccatttttccagcataaaaaatcacatggaaaagacaaagaaaacagaggcattaacacactggagaggtctaaagtggaagaaactacagagcacttggttacaaagagcagattacctctgcgagcccagatcaacctttaattcacttgggggttggcaattttatttttaaagaaaacttaaaaataaaacctgaaaccccagaacttgagccttgtgtatagattttaaaagaatatatatatcagccgggcgcggtggctcatgcctgtaatcccagcactttgggaggctgaggcgggtggattgcttgagcccaggagtttgagaccagcctggccaacgtggcaaaacctcgtctctgttaaaaattagccgggcgtggtggcacactcctgtaatcccagctactggggaggctgaggcacgagaatcacttgaacccaggaagcggggttgcagtgagccaaaggtacaccactacactccagcctgggcaacagagcaagactcggtctcaaaaacaaaatttaaaaaagatataaggcagtactgtaaattcagttgaattttgatatctacccatttttctgtcatccctatagttcactttgtattaaattgggtttcatttgggatttgcaatgtaaatacgtatttctagttttcatataaagtagttcttttataacaaatgaaaagtatttttcttgtatattattaagtaatgaatatataagaactgtactcttctcagcttgagcttacataggtaaatatcaccaacatctgtccttagaaaggaccatctcatgttttttttcttgctatgacttgtgtattttcttgcatcctccctagacttccctatttcgctttctcctcggctcactttctccctttttatttttcaccaaaccatttgtagagctacaaaaggtatcctttcttattttcagtagtcagaattttatctagaaatcttttaacacctttttagtggttatttctaaaatcactgtcaacaataaatctaaccctagttgtatccctcctttcagtatttttcacttgttgccccaaatgtgaaagcatttcattcctttaagaggcctaactcattcaccctgacagagttcacaaaaagcccacttaagagtatacattgctattatgggagaccacccagacatctgactaatggctctgtgcccacactccaagacctgtgccttttagagaagctcacaatgatttaaggactgtttgaaacttccaattatgtctataatttatattcttttgtttacatgatgaaactttttgttgttgcttgtttgtatataatacaatgtgtacatgtatctttttctcgattcaaatcttaacccttaggactctggtatttttgatctggcaaccatatttctggaagttgagatgtttcagcttgaagaaccaaaacagaaggaatatgtacaaagaataaattttctgctcacgatgagtttagtgtgtaaagtttagagacatctgactttgatagctaaattaaaccaaaccctattgaagaattgaatatatgctacttcaagaaactaaattgatctcgtagaattatcttaataaaataatggctataatttctctgcaaaatcagatgtcagcataagcgatggataatacctaataaactgccctcagtaaatccatggttaataaatgtggtttctacatt

SEQ ID NO: 472 - protein, 1056 aa, Homo sapiens
  VARIANT 869: Xaa = any amino acid
MASQPNSSAKKKEEKGKNIQVVVRCRPFNLAERKASAHSIVECDPVRKEVSVRTGGLADKSSRKTYTFDMVFGASTKQIDVYRSVVCPILDEVIMGYNCTIFAYGQTGTGKTFTMEGERSPNEEYTWEEDPLAGIIPRTLHQIFEKLTDNGTEFSVKVSLLEIYNEELFDLLNPSSDVSERLQMFDDPRNKRGVIIKGLEEITVHNKDEVYQILEKGAAKRTTAATLMNAYSSRSHSVFSVTIHMKETTIDGEELVKIGKLNLVDLAGSENIGRSGAVDKRAREAGNINQSLLTLGRVITALVERTPHVPYRESKLTRILQDSLGGRTRTSIIATISPASLNLEETLSTLEYAHRAKNILNKPEVNQKLTKKALIKEYTEEIERLKRDLAAAREKNGVYISEENFRVMSGKLTVQEEQIVELIEKIGAVEEELNRVTELFMDNKNELDQCKSDLQNKTQELETTQKHLQETKLQLVKEEYITSALESTEEKLHDAASKLLNTVEETTKDVSGLHSKLDRKKAVDQHNAEAQDIFGKNLNSLFNNMEELIKDGSSKQKAMLEVHKTLFGNLLSSSVSALDTITTVALGSLTSIPENVSTHVSQIFNMILKEQSLAAESKTVLQELINVLKTDLLSSLEMILSPTVVSILKINSQLKHIFKTSLTVADKIEDQKKELDGFLSILCNNLHELQENTICSLVESQKQCGNLTEDLKTIKQTHSQELCKLMNLWTERFCALEEKCENIQKPLSSVQENIQQKSKDIVNKMTFHSQKFCADSDGFSQELRNFNQEGTKLVEESVKHSDKLNGNLEKISQETEQRCESLNTRTVYFSEQWVSSLNEREQELHNLLEVVSQCCEASSSDITEKSDGXKAAHEKQHNIFLDQMTIDEDKLIAQNLELNETIKIGLTKLNCFLEQDLKLDIPTGTTPQRKSYLYPSTLVRTEPREHLLDQLKRKQPELLMMLNCSENNKEETIPDVDVEEAVLGQYTEEPLSQEPSVDAGVDCSSIGGVPFFQHKKSHGKDKENRGINTLERSKVEETTEHLVTKSRLPLRAQINL

SEQ ID NO: 473 - DNA, 3723 bp, Homo sapiens
  CDS (6)...(3176): Nucleic acid sequence encoding KNSL1
ccgtcatggcgtcgcagccaaattcgtctgcgaagaagaaagaggagaaggggaagaacatccaggtggtggtgagatgcagaccatttaatttggcagagcggaaagctagcgcccattcaatagtagaatgtgatcctgtacgaaaagaagttagtgtacgaactggaggattggctgacaagagctcaaggaaaacatacacttttgatatggtgtttggagcatctactaaacagattgatgtttaccgaagtgttgtttgtccaattctggatgaagttattatgggctataattgcactatctttgcgtatggccaaactggcactggaaaaacttttacaatggaaggtgaaaggtcacctaatgaagagtatacctgggaagaggatcccttggctggtataattccacgtacccttcatcaaatttttgagaaacttactgataatggtactgaattttcagtcaaagtgtctctgttggagatctataatgaagagctttttgatcttcttaatccatcatctgatgtttctgagagactacagatgtttgatgatccccgtaacaagagaggagtgataattaaaggtttagaagaaattacagtacacaacaaggatgaagtctatcaaattttagaaaagggggcagcaaaaaggacaactgcagctactctgatgaatgcatactctagtcgttcccactcagttttctctgttacaatacatatgaaagaaactacgattgatggagaagagcttgttaaaatcggaaagttgaacttggttgatcttgcaggaagtgaaaacattggccgttctggagctgttgataagagagctcgggaagctggaaatataaatcaatccctgttgactttgggaagggtcattactgcccttgtagaaagaacacctcatgttccttatcgagaatctaaactaactagaatcctccaggattctcttggagggcgtacaagaacatctataattgcaacaatttctcctgcatctctcaatcttgaggaaactctgagtacattggaatatgctcatagagcaaagaacatattgaataagcctgaagtgaatcagaaactcaccaaaaaagctcttattaaggagtatacggaggagatagaacgtttaaaacgagatcttgctgcagcccgtgagaaaaatggagtgtatatttctgaagaaaattttagagtcatgagtggaaaattaactgttcaagaagagcagattgtagaattgattgaaaaaattggtgctgttgaggaggagctgaatagggttacagagttgtttatggataataaaaatgaacttgaccagtgtaaatctgacctgcaaaataaaacacaagaacttgaaaccactcaaaaacatttgcaagaaactaaattacaacttgttaaagaagaatatatcacatcagctttggaaagtactgaggagaaacttcatgatgctgccagcaagctgcttaacacagttgaagaaactacaaaagatgtatctggtctccattccaaactggatcgtaagaaggcagttgaccaacacaatgcagaagctcaggatatttttggcaaaaacctgaatagtctgtttaataatatggaagaattaattaaggatggcagctcaaagcaaaaggccatgctagaagtacataagaccttatttggtaatctgctgtcttccagtgtctctgcattagataccattactacagtagcacttggatctctcacatctattccagaaaatgtgtctactcatgtttctcagatttttaatatgatactaaaagaacaatcattagcagcagaaagtaaaactgtactacaggaattgattaatgtactcaagactgatcttctaagttcactggaaatgattttatccccaactgtggtgtctatactgaaaatcaatagtcaactaaagcatattttcaagacttcattgacagtggccgataagatagaagatcaaaaaaaggaactagatggctttctcagtatactgtgtaacaatctacatgaactacaagaaaataccatttgttccttggttgagtcacaaaagcaatgtggaaacctaactgaagacctgaagacaataaagcagacccattcccaggaactttgcaagttaatgaatctttggacagagagattctgtgctttggaggaaaagtgtgaaaatatacagaaaccacttagtagtgtccaggaaaatatacagcagaaatctaaggatatagtcaacaaaatgacttttcacagtcaaaaattttgtgctgattctgatggcttctcacaggaactcagaaattttaaccaagaaggtacaaaattggttgaagaatctgtgaaacactctgataaactcaatggcaacctggaaaaaatatctcaagagactgaacagagatgtgaatctctgaacacaagaacagtttatttttctgaacagtgggtatcttccttaaatgaaagggaacaggaacttcacaacttattggaggttgtaagccaatgttgtgaggcttcaagttcagacatcactgagaaatcagatggadgtaaggcagctcatgagaaacagcataacatttttcttgatcagatgactattgatgaagataaattgatagcacaaaatctagaacttaatgaaaccataaaaattggtttgactaagcttaattgctttctggaacaggatctgaaactggatatcccaacaggtacgacaccacagaggaaaagttatttatacccatcaacactggtaagaactgaaccacgtgaacatctccttgatcagctgaaaaggaaacagcctgagctgttaatgatgctaaactgttcagaaaacaacaaagaagagacaattccggatgtggatgtagaagaggcagttctggggcagtatactgaagaacctctaagtcaagagccatctgtagatgctggtgtggattgttcatcaattggcggggttccatttttccagcataaaaaatcacatggaaaagacaaagaaaacagaggcattaacacactggagaggtctaaagtggaagaaactacagagcacttggttacaaagagcagattacctctgcgagcccagatcaacctttaattcacttgggggttggcaattttatttttaaagaaaacttaaaaataaaacctgaaaccccagaacttgagccttgtgtatagattttaaaagaatatatatatcagccgggcgcggtggctcatgcctgtaatcccagcactttgggaggctgaggcgggtggattgcttgagcccaggagtttgagaccagcctggccaacgtggcaaaacctcgtctctgttaaaaattagccgggcgtggtggcacactcctgtaatcccagctactggggaggctgaggcacgagaatcacttgaacccaggaagcggggttgcagtgagccaaaggtacaccactacactccagcctgggcaacagagcaagactcggtctcaaaaacaaaatttaaaaaagatataaggcagtactgtaaattcagttgaattttgatatctacccatttttctgtcatccctatagttcactttgtattaaattgggtttcatttgggatttgcaatgtaaatacgtatttctagttttcatataaagtagttctttta

SEQ ID NO: 474 - protein, 1056 aa, Homo sapiens; identical to SEQ ID NO: 472
  VARIANT 869: Xaa = any amino acid

SEQ ID NO: 475 - DNA, 4858 bp, Homo sapiens
  CDS (91)...(3261): Nucleic acid sequence encoding KNSL1
agactccggcccctgtcggccgccaagcccctccgcccctcacagcgcccaggtccgcggccgggccttgattttttggcggggaccgtcatggcgtcgcagccaaattcgtctgcgaagaagaaagaggagaaggggaagaacatccaggtggtggtgagatgcagaccatttaatttggcagagcggaaagctagcgcccattcaatagtagaatgtgatcctgtacgaaaagaagttagtgtacgaactggaggattggctgacaagagctcaaggaaaacatacacttttgatatggtgtttggagcatctactaaacagattgatgtttaccgaagtgttgtttgtccaattctggatgaagttattatgggctataattgcactatctttgcgtatggccaaactggcactggaaaaacttttacaatggaaggtgaaaggtcacctaatgaagagtatacctgggaagaggatcccttggctggtataattccacgtacccttcatcaaatttttgagaaacttactgataatggtactgaattttcagtcaaagtgtctctgttggagatctataatgaagagctttttgatcttcttaatccatcatctgatgtttctgagagactacagatgtttgatgatccccgtaacaagagaggagtgataattaaaggtttagaagaaattacagtacacaacaaggatgaagtctatcaaattttagaaaagggggcagcaaaaaggacaactgcagctactctgatgaatgcatactctagtcgttcccactcagttttctctgttacaatacatatgaaagaaactacgattgatggagaagagcttgttaaaatcggaaagttgaacttggttgatcttgcaggaagtgaaaacattggccgttctggagctgttgataagagagctcgggaagctggaaatataaatcaatccctgttgactttgggaagggtcattactgcccttgtagaaagaacacctcatgttccttatcgagaatctaaactaactagaatcctccaggattctcttggagggcgtacaagaacatctataattgcaacaatttctcctgcatctctcaatcttgaggaaactctgagtacattggaatatgctcatagagcaaagaacatattgaataagcctgaagtgaatcagaaactcaccaaaaaagctcttattaaggagtatacggaggagatagaacgtttaaaacgagatcttgctgcagcccgtgagaaaaatggagtgtatatttctgaagaaaattttagagtcatgagtggaaaattaactgttcaagaagagcagattgtagaattgattgaaaaaattggtgctgttgaggaggagctgaatagggttacagagttgtttatggataataaaaatgaacttgaccagtgtaaatctgacctgcaaaataaaacacaagaacttgaaaccactcaaaaacatttgcaagaaactaaattacaacttgttaaagaagaatatatcacatcagctttggaaagtactgaggagaaacttcatgatgctgccagcaagctgcttaacacagttgaagaaactacaaaagatgtatctggtctccattccaaactggatcgtaagaaggcagttgaccaacacaatgcagaagctcaggatatttttggcaaaaacctgaatagtctgtttaataatatggaagaattaattaaggatggcagctcaaagcaaaaggccatgctagaagtacataagaccttatttggtaatctgctgtcttccagtgtctctgcattagataccattactacagtagcacttggatctctcacatctattccagaaaatgtgtctactcatgtttctcagatttttaatatgatactaaaagaacaatcattagcagcagaaagtaaaactgtactacaggaattgattaatgtactcaagactgatcttctaagttcactggaaatgattttatccccaactgtggtgtctatactgaaaatcaatagtcaactaaagcatattttcaagacttcattgacagtggccgataagatagaagatcaaaaaaaggaactagatggctttctcagtatactgtgtaacaatctacatgaactacaagaaaataccatttgttccttggttgagtcacaaaagcaatgtggaaacctaactgaagacctgaagacaataaagcagacccattcccaggaactttgcaagttaatgaatctttggacagagagattctgtgctttggaggaaaagtgtgaaaatatacagaaaccacttagtagtgtccaggaaaatatacagcagaaatctaaggatatagtcaacaaaatgacttttcacagtcaaaaattttgtgctgattctgatggcttctcacaggaactcagaaattttaaccaagaaggtacaaaattggttgaagaatctgtgaaacactctgataaactcaatggcaacctggaaaaaatatctcaagagactgaacagagatgtgaatctctgaacacaagaacagtttatttttctgaacagtgggtatcttccttaaatgaaagggaacaggaacttcacaacttattggaggttgtaagccaatgttgtgaggcttcaagttcagacatcactgagaaatcagatggadgtaaggcagctcatgagaaacagcataacatttttcttgatcagatgactattgatgaagataaattgatagcacaaaatctagaacttaatgaaaccataaaaattggtttgactaagcttaattgctttctggaacaggatctgaaactggatatcccaacaggtacgacaccacagaggaaaagttatttatacccatcaacactggtaagaactgaaccacgtgaacatctccttgatcagctgaaaaggaaacagcctgagctgttaatgatgctaaactgttcagaaaacaacaaagaagagacaattccggatgtggatgtagaagaggcagttctggggcagtatactgaagaacctctaagtcaagagccatctgtagatgctggtgtggattgttcatcaattggcggggttccatttttccagcataaaaaatcacatggaaaagacaaagaaaacagaggcattaacacactggagaggtctaaagtggaagaaactacagagcacttggttacaaagagcagattacctctgcgagcccagatcaacctttaattcacttgggggttggcaattttatttttaaagaaaacttaaaaataaaacctgaaaccccagaacttgagccttgtgtatagattttaaaagaatatatatatcagccgggcgcggtggctcatgcctgtaatcccagcactttgggaggctgaggcgggtggattgcttgagcccaggagtttgagaccagcctggccaacgtggcaaaacctcgtctctgttaaaaattagccgggcgtggtggcacactcctgtaatcccagctactggggaggctgaggcacgagaatcacttgaacccaggaagcggggttgcagtgagccaaaggtacaccactacactccagcctgggcaacagagcaagactcggtctcaaaaacaaaatttaaaaaagatataaggcagtactgtaaattcagttgaattttgatatctacccatttttctgtcatccctatagttcactttgtattaaattgggtttcatttgggatttgcaatgtaaatacgtatttctagttttcatataaagtagttcttttataacaaatgaaaagtatttttcttgtatattattaagtaatgaatatataagaactgtactcttctcagcttgagcttacataggtaaatatcaccaacatctgtccttagaaaggaccatctcatgttttttttcttgctatgacttgtgtattttcttgcatcctccctagacttccctatttcgctttctcctcggctcactttctccctttttatttttcaccaaaccatttgtagagctacaaaaggtatcctttcttattttcagtagtcagaattttatctagaaatcttttaacacctttttagtggttatttctaaaatcactgtcaacaataaatctaaccctagttgtatccctcctttcagtatttttcacttgttgccccaaatgtgaaagcatttcattcctttaagaggcctaactcattcaccctgacagagttcacaaaaagcccacttaagagtatacattgctattatgggagaccacccagacatctgactaatggctctgtgcccacactccaagacctgtgccttttagagaagctcacaatgatttaaggactgtttgaaacttccaattatgtctataatttatattcttttgtttacatgatgaaactttttgttgttgcttgtttgtatataatacaatgtgtacatgtatctttttctcgattcaaatcttaacccttaggactctggtatttttgatctggcaaccatatttctggaagttgagatgtttcagcttgaagaaccaaaacagaaggaatatgtacaaagaataaattttctgctcacgatgagtttagtgtgtaaagtttagagacatctgactttgatagctaaattaaaccaaaccctattgaagaattgaatatatgctacttcaagaaactaaattgatctcgtagaattatcttaataaaataatggctataatttctctgcaaaatcagatgtcagcataagcgatggataatacctaataaactgccctcagtaaatccatggttaataaatgtggtttctacatt

SEQ ID NO: 476 - protein, 1056 aa, Homo sapiens; identical to SEQ ID NO: 472
  VARIANT 869: Xaa = Any Amino Acid

SEQ ID NO: 477 - DNA, 919 bp, Homo sapiens
  allele 420: N is any
cacttcggaggattgctcaacaaccatgctgggcatctggaccctcctacctctggttcttacgtctgttgctagattatcgtccaaaagtgttaatgcccaagtgactgacatcaactccaagggattggaattgaggaagactgttactacagttgagactcagaacttggaaggcctgcatcatgatggccaattctgccataahccctgtcctccagatgtgaacatggaatcatcaaggaatgcacactcaccagcaacaccaagtgcaaagaggaaggatccagatctaacttggggtggctttgtcttcttcttttgccaattccactaattgtttgggtgaagagaaaggaagtacagaaaacatgcagaaagcacagaaaggaaaaccaaggttctcatgaatctccaacnttaaatcctgaaacagtggcaataaattttcagatgttgacttgagtaaatatatcaccactattgctggagtcatgacactaagtcaagttaaaggctttgttcgaaagaatggtgtcaatgaagccaaaatagatgagatcaagaatgacaatgtccaagacacagcagaacagaaagttcaactgcttcgtaattggcatcaacttcatggaaagaaagaagcgtatgacacattgattaaagatctcaaaaaagccaatctttgtactcttgcagagaaaattcagactatcatcctcaaggacattactagtgactcagaaaattcaaacttcagaaatgaaatccaaagcttggtctagagtgaaaaacaacaaattcagttctgagtatatgcaattagtgtttgaaaagattcttaatagctggctgtaaatactgcttggttttttactgggtacattttatcatttattagcgctgaagagccaacata

SEQ ID NO: 478 - DNA, 2533 bp, Homo sapiens
  allele 416,836,1766: N is any
gacgcttctggggagtgagggaagcggtttacgagtgacttggctggagcctcaggggcgggcactggcacggaacacaccctgaggccagccctggctgcccaggcggagctgcctcttctcccgcgggttggtggacccgctcagtacggagttggggaagctctttcacttcggaggattgctcaacaaccatgctgggcatctggaccctcctacctctggttcttacgtctgttgctagattatcgtccaaaagtgttaatgcccaagtgactgacatcaactccaagggattggaattgaggaagactgttactacagttgagactcagaacttggaaggcctgcatcatgatggccaattctgccataahccctgtcctccaggtgaaaggaaagctagggactgcacngtcaatggggatgaaccagactgcgtgccctgccaagaagggaaggagtacacagacaaagcccatttttcttccaaatgcagaagatgtagattgtgtgatgaaggacatggcttagaagtggaaataaactgcacccggacccagaataccaagtgcagatgtaaaccaaactttttttgtaactctactgtatgtgaacactgtgacccttgcaccaaatgtgaacatggaatcatcaaggaatgcacactcaccagcaacaccaagtgcaaagaggaaggatccagatctaacttggggtggctttgtcttcttcttttgccaattccactaattgtttgggtgaagagaaaggaagtacagaaaacatgcagaaagcacagaaaggaaaaccaaggttctcatgaatctccaacnttaaatcctgaaacagtggcaataaattttcagatgttgacttgagtaaatatatcaccactattgctggagtcatgacactaagtcaagttaaaggctttgttcgaaagaatggtgtcaatgaagccaaaatagatgagatcaagaatgacaatgtccaagacacagcagaacagaaagttcaactgcttcgtaattggcatcaacttcatggaaagaaagaagcgtatgacacattgattaaagatctcaaaaaagccaatctttgtactcttgcagagaaaattcagactatcatcctcaaggacattactagtgactcagaaaattcaaacttcagaaatgaaatccaaagcttggtctagagtgaaaaacaacaaattcagttctgagtatatgcaattagtgtttgaaaagattcttaatagctggctgtaaatactgcttggttttttactgggtacattttatcatttattagcgctgaagagccaacatatttgtagatttttaatatctcatgattctgcctccaaggatgtttaaaatctagttgggaaaacaaacttcatcaagagtaaatgcagtggcatgctaagtacccaaataggagtgtatgcagaggatgaaagattaagattatgctctggcatctaacatatgattctgtagtatgaatgtaatcagtgtatgttagtacaaatgtctatccacaggctaaccccactctatgaatcaatagaagaagctatgaccttttgctgaaatatcagttactgaacaggcaggccactttgcctctaaattacctctgataattctagagattttaccatatttctaaactttgtttataactctgagaagatcatatttatgtaaagtatatgtatttgagtgcagaatttaaataaggctctacctcaaagncctttgcacagtttattggtgtcatattatacaatatttcaattgtgaattcacatagaaaacattaaattataatgtttgactattatatatgtgtatgcattttactggctcaaaactacctacttctttctcaggcatcaaaagcattttgagcaggagagtattactagagctttgccacctctccatttttgccttggtgctcatcttaatggcctaatgcacccccaaacatggaaatatcaccaaaaaatacttaatagtccaccaaaaggcaagactgcccttagaaattctagcctggtttggagatactaactgctctcagagaaagtagctttgtgacatgtcatgaacccatgtttgcaatcaaagatgataaaatagattcttatttttcccccacccccgaaaatgttcaataatgtcccatgtaaaacctgctacaaatggcagcttatacatagcaatggtaaaatcatcatctggatttaggaattgctcttgtcatacccccaagtttctaagatttaagattctccttactactatcctacgtttaaatatctttgaaagtttgtattaaatgtgaattttaagaaataatatttatatttctgtaaatgtaaactgtgaagatagttataaactgaagcagatacctggaaccacctaaagaacttccatttatggaggatttttttgccccttgtgtttggaattataaaatataggtaaaagtacgtaattaaataatgtttttg

SEQ ID NO: 479 - DNA, 2550 bp, Homo sapiens
  allele 442,862,1792: n is any
gcaagagtgacacacaggtgttcaaagacgcttctggggagtgagggaagcggtttacgagtgacttggctggagcctcaggggcgggcactggcacggaacacaccctgaggccagccctggctgcccaggcggagctgcctcttctcccgcgggttggtggacccgctcagtacggagttggggaagctctttcacttcggaggattgctcaacaaccatgctgggcatctggaccctcctacctctggttcttacgtctgttgctagattatcgtccaaaagtgttaatgcccaagtgactgacatcaactccaagggattggaattgaggaagactgttactacagttgagactcagaacttggaaggcctgcatcatgatggccaattctgccataahccctgtcctccaggtgaaaggaaagctagggactgcacngtcaatggggatgaaccagactgcgtgccctgccaagaagggaaggagtacacagacaaagcccatttttcttccaaatgcagaagatgtagattgtgtgatgaaggacatggcttagaagtggaaataaactgcacccggacccagaataccaagtgcagatgtaaaccaaactttttttgtaactctactgtatgtgaacactgtgacccttgcaccaaatgtgaacatggaatcatcaaggaatgcacactcaccagcaacaccaagtgcaaagaggaaggatccagatctaacttggggtggctttgtcttcttcttttgccaattccactaattgtttgggtgaagagaaaggaagtacagaaaacatgcagaaagcacagaaaggaaaaccaaggttctcatgaatctccaacnttaaatcctgaaacagtggcaataaattttcagatgttgacttgagtaaatatatcaccactattgctggagtcatgacactaagtcaagttaaaggctttgttcgaaagaatggtgtcaatgaagccaaaatagatgagatcaagaatgacaatgtccaagacacagcagaacagaaagttcaactgcttcgtaattggcatcaacttcatggaaagaaagaagcgtatgacacattgattaaagatctcaaaaaagccaatctttgtactcttgcagagaaaattcagactatcatcctcaaggacattactagtgactcagaaaattcaaacttcagaaatgaaatccaaagcttggtctagagtgaaaaacaacaaattcagttctgagtatatgcaattagtgtttgaaaagattcttaatagctggctgtaaatactgcttggttttttactgggtacattttatcatttattagcgctgaagagccaacatatttgtagatttttaatatctcatgattctgcctccaaggatgtttaaaatctagttgggaaaacaaacttcatcaagagtaaatgcagtggcatgctaagtacccaaataggagtgtatgcagaggatgaaagattaagattatgctctggcatctaacatatgattctgtagtatgaatgtaatcagtgtatgttagtacaaatgtctatccacaggctaaccccactctatgaatcaatagaagaagctatgaccttttgctgaaatatcagttactgaacaggcaggccactttgcctctaaattacctctgataattctagagattttaccatatttctaaactttgtttataactctgagaagatcatatttatgtaaagtatatgtatttgagtgcagaatttaaataaggctctacctcaaagncctttgcacagtttattggtgtcatattatacaatatttcaattgtgaattcacatagaaaacattaaattataatgtttgactattatatatgtgtatgcattttactggctcaaaactacctacttctttctcaggcatcaaaagcattttgagcaggagagtattactagagctttgccacctctccatttttgccttggtgctcatcttaatggcctaatgcacccccaaacatggaaatatcaccaaaaaatacttaatagtccaccaaaaggcaagactgcccttagaaattctagcctggtttggagatactaactgctctcagagaaagtagctttgtgacatgtcatgaacccatgtttgcaatcaaagatgataaaatagattcttatttttcccccacccccgaaaatgttcaataatgtcccatgtaaaacctgctacaaatggcagcttatacatagcaatggtaaaatcatcatctggatttaggaattgctcttgtcatacccccaagtttctaagatttaagattctccttactactatcctacgtttaaatatctttgaaagtttgtattaaatgtgaattttaagaaataatatttatatttctgtaaatgtaaactgtgaagatagttataaactgaagcagatacctggaaccacctaaagaacttccatttatggaggatttttttgccccttgtgtttggaattataaaatataggtaaaagtacgtaattaaata

SEQ ID NO: 480 - DNA, 1103 bp, Homo sapiens
  allele 247,604: N is any
cacttcggaggattgctcaacaaccatgctgggcatctggaccctcctacctctggttcttacgtctgttgctagattatcgtccaaaagtgttaatgcccaagtgactgacatcaactccaagggattggaattgaggaagactgttactacagttgagactcagaacttggaaggcctgcatcatgatggccaattctgccataahccctgtcctccaggtgaaaggaaagctagggactgcacngtcaatggggatgaaccagactgcgtgccctgccaagaagggaaggagtacacagacaaagcccatttttcttccaaatgcagaagatgtagattgtgtgatgaaggacatggcttagaagtggaaataaactgcacccggacccagaataccaagtgcagatgtaaaccaaactttttttgtaactctactgtatgtgaacactgtgacccttgcaccaaatgtgaacatggaatcatcaaggaatgcacactcaccagcaacaccaagtgcaaagaggaagtgaagagaaaggaagtacagaaaacatgcagaaagcacagaaaggaaaaccaaggttctcatgaatctccaacnttaaatcctgaaacagtggcaataaattttcagatgttgacttgagtaaatatatcaccactattgctggagtcatgacactaagtcaagttaaaggctttgttcgaaagaatggtgtcaatgaagccaaaatagatgagatcaagaatgacaatgtccaagacacagcagaacagaaagttcaactgcttcgtaattggcatcaacttcatggaaagaaagaagcgtatgacacattgattaaagatctcaaaaaagccaatctttgtactcttgcagagaaaattcagactatcatcctcaaggacattactagtgactcagaaaattcaaacttcagaaatgaaatccaaagcttggtctagagtgaaaaacaacaaattcagttctgagtatatgcaattagtgtttgaaaagattcttaatagctggctgtaaatactgcttggttttttactgggtacattttatcatttattagcgctgaagagccaacata

SEQ ID NO: 481 - DNA, 974 bp, Homo sapiens
  allele 247: n is any
cacttcggaggattgctcaacaaccatgctgggcatctggaccctcctacctctggttcttacgtctgttgctagattatcgtccaaaagtgttaatgcccaagtgactgacatcaactccaagggattggaattgaggaagactgttactacagttgagactcagaacttggaaggcctgcatcatgatggccaattctgccataahccctgtcctccaggtgaaaggaaagctagggactgcacngtcaatggggatgaaccagactgcgtgccctgccaagaagggaaggagtacacagacaaagcccatttttcttccaaatgcagaagatgtagattgtgtgatgaaggacatgatgtgaacatggaatcatcaaggaatgcacactcaccagcaacaccaagtgcaaagaggaaggatccagatctaacttggggtggctttgtcttcttcttttgccaattccactaattgtttggggaaacagtggcaataaattttcagatgttgacttgagtaaatatatcaccactattgctggagtcatgacactaagtcaagttaaaggctttgttcgaaagaatggtgtcaatgaagccaaaatagatgagatcaagaatgacaatgtccaagacacagcagaacagaaagttcaactgcttcgtaattggcatcaacttcatggaaagaaagaagcgtatgacacattgattaaagatctcaaaaaagccaatctttgtactcttgcagagaaaattcagactatcatcctcaaggacattactagtgactcagaaaattcaaacttcagaaatgaaatccaaagcttggtctagagtgaaaaacaacaaattcagttctgagtatatgcaattagtgtttgaaaagattcttaatagctggctgtaaatactgcttggttttttactgggtacattttatcatttattagcgctgaagagccaacata

SEQ ID NO: 482 - DNA, 2493 bp, Homo sapiens
  allele 86,107,2149: n is any
actgcgactcgagacagcggcccggcaggacagctccagaatgaaaatgcggttcttggggttggtggtctgtttggttctctggnccctgcattctgaggggtctngagggaaactgacagctgtggatcctgaaacaaacatgaatgtgagtgaaattatctcttactggggattccctagtgaggaatacctagttgagacagaagatggatatattctgtgccttaaccgaattcctcatgggaggaagaaccattctgacaaaggtcccaaaccagttgtcttcctgcaacatggcttgctggcagattctagtaactgggtcacaaaccttgccaacagcagcctgggcttcattcttgctgatgctggttttgacgtgtggatgggcaacagcagaggaaatacctggtctcggaaacataagacactctcagtttctcaggatgaattctgggctttcagttatgatgagatggcaaaatatgacctaccagcttccattaacttcattctgaataaaactggccaagaacaagtgtattatgtgggtcattctcaaggcaccactataggttttatagcattttcacagatccctgagctggctaaaaggattaaaatgttttttgccctgggtcctgtggcttccgtcgccttctgtactagccctatggccaaattaggacgattaccagatcatctcattaaggacttatttggagacaaagaatttcttccccagagtgcgtttttgaagtggctgggtacccacgtttgcactcatgtcatactgaaggagctctgtggaaatctctgttttcttctgtgtggatttaatgagagaaatttaaatatgtctagagtggatgtatatacaacacattctcctgctggaacttctgtgcaaaacatgttacactggagccaggctgttaaattccaaaagtttcaagcctttgactggggaagcagtgccaagaattattttcattacaaccagagttatcctcccacatacaatgtgaaggacatgcttgtgccgactgcagtctggagcgggggtcacgactggcttgcagatgtctacgacgtcaatatcttactgactcagatcaccaacttggtgttccatgagagcattccggaatgggagcatcttgacttcatttggggcctggatgccccttggaggctttataataaaattattaatctaatgaggaaatatcagtgaaagctggacttgagctgtgtaccaccaagtcaatgattatgtcatgtgaaaatgtgtttgcttcatttctgtaaaacacttgtttttctttcccaggtcttttgtttttttatatccaagaaaatgataactttgaagatgcccagttcactctagtttcaattagaaacatactagctattttttctttaattagggctggaataggaagccagtgtctcaaccatagtattgtctctttaagtcttttaaatatcactgatgtgtaaaaaggtcattatatccattctgtttttaaaatttaaaatatattgactttttgcccttcataggacaaagtaatatatgtgttggaattttaaaattgtgttgtcattggtaaatctgtcactgacttaagcgaggtataaaagtacgcagttttcatgtccttgccttaaagagctctctagtctaacggtcttgtagttagagatctaaatgacattttatcatgttttcctgcagcaggtgcatagtcaaatccagaaatatcacagctgtgccagtaataaggatgctaacaattaattttatcaaacctaactgtgacagctgtgatttgacacgttttaattgctcaggttaaatgaaatagttttccggcgtcttcaaaaacaaattgcactgataaaacaaaaacaaaagtatgttttaaatgctttgaagactgatacactcaaccatctatattcatgagctctcaatttcatggcaggccatagttctacttatctgagaagcaaatccctgtggagactataccactattttttctgagattaatgtactcttggagcccgctactgtcgttattgatcacatctgtgtgaagccaaagccccgtggttgcccatgagaagtgtcctngttcattttcacccaaatgaagtgtgaacgtgatgttttcggatgcaaactcagctcagggattcattttgtgtcttagttttatatgcatccttatttttaatacacctgcttcacgtccctatgttgggaagtccatatttgtctgcttttcttgcagcatcatttccttacaatactgtcdggtggacaaaatgacaattgatatgtttttctgatataattactttagctgcactaacagtacaatgcttgttaatggttaatataggcagggcgaatactactttgtaacttttaaagtcttaaacttttcaataaaattgagtgagacttataggccc

SEQ ID NO: 483 - DNA, 6012 bp, Homo sapiens
aagccagtccgtcctgagccttggctcaggcttctgggaatgtggtaggccatgggggtgcgcccgcctgccaaattggcagtgccctttaatggggaaccctgctgccctgggacgccatgaaaagagcgtggacttcgaggtggggccacaggaagtggtcaggtccatctcaggggacctgctgcccatccacactgctggccaggaaatggggggcaattcatgcctcctcagcaccttcagcactgggcggctcaaagaagggaagggactattctggggtcacacagcatgcagccagaggccaaggcatgaggaagtccttcatttccccacccccacccacctcagatcctccaaccggtttcatggcagcccagggtccagcggcatccaggatgctggtgggtagctgcacagcccaggccgcgggaggttggctgctctcacctaacaggcctatgtggccctgacccctacctaggaagctggggacaatggccaaggcgcctcccctctctgtgcctgtctgtccaggtgcagcatagacacagcacccctggggccaagagcacccagccagggctgcccccatgggtgggcagggcagtaaatgaatgagggacaggttgggaggtggccagccccctccagcccatggagggcacggggcaggagagctgggctgagccagcaggagcccagggagcctggtctctgccttcctatcctggaggaaggtgaggctgaacctccttccctccctccctccctccccgcccccactgcacgcagggctggctgggctccagctggcctccgcatcaatatttcatcggcgtcaataggaggcatcggggacagccgctgcggcagcactcgagccagctcaagcccgcagctcgcagggagatccagctccgtcctgcctgcagcagcmcaaccctgcacacccaccatggatgtcttcaagaagggcttctccatcgccaaggagggcgtggtgggtgcggtggaaaagaccaagcagggggtgacggaagcagctgagaagaccaaggagggggtcatgtatgtgggtaagtggggcatggcagggtgggacagtgtggtggccaaagggtgagtgcccagttaccttcgccagaccttactccccagccccagggaggcattttgggagggggcgaggccctggctatcaaggtggggtctccacaccctggagcacccacaatgccctgtgcacacctatgtgtgtttgtctttggcctcctcggggcctctgggtgtcagagacagcagacagggctggctacctgtctgtgcacgcacacacacattcccaagcataccaccctcccctgagcgtggagcccctgaagccatgagcagcctgtgctcaggtggcccccaccctctccacacgggagcggctacagccaggtcacggatcccctccctccccagagagaaggggcaggctgggggatgaaacctaggctcagtgttccctcccccgcatcctctcctggcactctccagaggaggaaggggaggtcaagccaatgactcagctctggcccatcctgtcctgttgctgcttctgaggcccggccacacccgggcagggggtggaccctgggtttagccagtgtccctacctcaggcctgctctctcttgtcccccacattctgtcctgtccccttcccatccatccacttcttccagacacagcaggaagaggccctctgaaggggccgccggcccccagacaccatccttacccccccaccgaccccacagtttgtccagctgttctgttgtgtttgtcctgaccgcccccaacacctcgagggaggtctgggctgacagctccatttcctccccaggagccaagaccaaggagaatgttgtacagagcgtgacctcaggtgagaagccccagggccaggggacacatgggggataggacccctggggctcctgcatcctagtgctggggctcaaacctagagtcctgccttacccccaactggggtcccaagccctacagacccctgcagaccataaggataaagtagggtgggcgtgtctttacccccaccagcatcagaggtgccctggagtcagagggagcaggggagggtcccagcagggccagggctctgagctcctgggaagggggtgcgagcctgactccagcaggcctgccttggggctggggctggggtggaggccagccagtgtcctcccatagtggccgagaagaccaaggagcaggccaacgcggtgagcgaggctgtggtgagcagcgtcaacactgtggccaccaagaccgtggaggaggcggagaacatcgcggtcacctccggggtggtgcgcaaggtgagccccggccctcaaacctgcccagtcctctcctgggcccagaaaggctgctgggcggaggcggcatcactccactccacaccccaggaaacaacacggggggctgcggctggcttcagtttcagtacccactgagcgccggcatggggtggggtccatgcttgctgttcgacctgcattcgggtctggaatcaccacaaccaccccttcgggggacttgggagcccatctcatagacaaggaaagtgaggctcaaaaccacatcttccggacggctctcagcacttaagaaacaccccattttataagtgaaaacaggatcccacacggtgacaggcaccctcccgggcagtggtcaccaggccgggggctgaataacaccagccccgcccccagggcctacctccctccctgggctgggcggggcacctgcctcctgctgggagcctcagggaagtacgtccctagtggtaagaaagcagtgctgcttctgacctaccctctgcagctgcctttgtgtgtgtgtgcacgtgtgttgagtgaacatgtgggtgcatttgtgagaatgtgtgggtgtacatgcgtgtgaatgtacacatgcgtgtgcggcccaatagcaaacagcacaggagcagtggggcgcaccccagggacgggtgttggctgggtgagctgtcccagcacctgtgacacagcaagctctgctttacgcattgtacccttattagttcatttaatagacacaaaatccatgagacggtgtggaaactaaggcccagagagattaatgtgcccaaggtcccatggctagttcatgtgagcttggaattccctgagcagcctgtactctgagagacctgtggcagtgtaagtggtggcctgggctaagatccctacctgggggtggggcgggggagcaatgtccagctctcctacctgctccaggcctcctaggtggtggagtctgaggctctgagcactgagaatccctgcgttaggagtgggtgggtggaagggtgggggctgccctactcctcttggctctggggcgatgcccaggtgtctgcttccagggccagcacagggtctccatgtccttggaactggcagccgctccctctcctagttctcctttctcgttgtatgaccttgagaagcaaaggaacctctctgggcctccgtgttctcatctgcaagatgggggtgagagtgtcggcttccctgggctgtgtgatgaggcagggccatgacttccatgaagcaattctcctggtctatgtgagcacccagcagaggaaggtgaccatcatcatcatcatcatcatgtgtcccaggcagaacacatagagccccagggggctcctccctcctcacccccagcaaaagaggccctggggtgagggtgcccgggcattccttgtgaatcccggagcagggctagtgagcccttggagccacctcgagggagactcatttcctggtgacaccccaaaaccagtcacgactcatctcccagtgaactgtgaaaggcctcagcagggactatctgaccactcatacccctggcctcatcatcagccttagggcagcaggactcagcaggtggccacctgccctgcccctggatagcctggccgactcccgccagcacagcactgcccttttatgccccactccgccaaggggcaggatggccctggggcaacacagaggtgacagtatccccgccttcccccccgtcccccgccagaggcaggtgctgaggccagagtgcagggcaatcaccagtgtggtcctacacacccagctgtcatgatatctcacgcaagtgtctggccggcatggagtgcaggagatagaagatgggaagtgagagaggactgtgtaacctctgttggccctgaccagcctgagcccagagcctgtccaggaggcaaagagagggagccatgctcctgtggactgaagtgggcctgaagcaagcctgatctgatgccaacacaccccaccactttgagttggaaggccctgagctgcatgccaagcctccctggcctcagagtccctatgtgaaccccaatcagtcttccttgtagggctactgaggtggggtcagacctggggcttcaggggcttttgcccattttaacccccattccaccttaccccacccaggttcttcatcagtgaagcccaactaggggcttcccagagactggggaccagcttgaggggtgaagctgggctccagggtacttggtgcccctggaaggcctcggcatcatcagagccccgggtattgtctgaattgcacgcccccaatacctccagcccctccaagtacaacaaggccacgaggggcctgtgctcttccttgaggccagggtagacaaggccctggttgcagggcagctaggggtctctgcattctccacatggtctcatgcccccttttgtcccctacaggaggacttgaggccatctgccccccaacaggagggtgtggcatccaaagagaaagaggaagtggcagaggaggtaggagctgggctcctggggtgcaccatggggggttccttggtagggaccccatcccccacagacgcactgcttccctcctgggctcccagggcccagaggggcctcctgaccttccacagcccctacagggactgtgtacagggctaaccctgaacctgagtgggaggtccccccacggatgacccctcaggcatggggcacagaagacaacttttctcagcccactcagggtggcccattaaggctggggcctggagctgggtgtgcaggtcattctctctcccaggcccagagtgggggagactagagggctacaggccagcgtggatgacctgaagagcgctcctctgccttggacaccatcccctcctagcacaaggagtgccgccttgagtgacatgcggctgcccacgctcctgccctcgtctycctggccacccttggcctgtccacctgtgctgctgcaccaacctcactgccctccctcggccccacccaccctctggtccttctgaccccacttatgctgctgtgaattttttttttaaatgattccaaataaaacttgagcccactcctgccatgcttcctctgggtgctgtgtagcttgaggaggggtccccaggtcctcccaggaacaggaacgggttcagcctgttgataggaccaggtatcctatagggacacacacagggcattcatgggacctgcgtgagccttcaggaacacccccaacccacccattgcctttaacatggaggaggcagcactgccttcggctccccaagacattcgacaggactcacagtcccatccacggggatagcttagctcagcctcaaggtagcccccgcctgcctgctctgagtccctgaggaacccactgtcagcaggaggtgaagataggctcctgggtcttccctccatgtgagttctgggctccagtgtcgcaagaggaacagggccacctaacatcctccctggggcagatggtgactttcaaagatggagaagtctaaacctagtgaggatgaagggcatcccacaggagagacagaaggtggaccctgcggcgc

SEQ ID NO: 484 - DNA, 202100 bp, Homo sapiens
taggacaaaattgatgtaaggtaagtctgtatttctagcattgtaaataagtagggttttctagcattttacgagttggcataaaaaacatgttcaaattttataaaaagattaaaaccatgccttatataaccagcatttcactaataaaagatgacattgctttatcatctgccaaatgtaatgttttccactgatttacatgaaaccatcaagtagaaagcaaatttgaggatcaatttttaaaaagttattacctttctaaatgttgtgaagccttctatgtcaagctaggaggcttttagaaaagagctaacttttaactttcttcggacaagtgactattttacagaatagggaaggaagattctataggaatatcattcattttaagcattgttatattggggaaatttctctcagtaatcaaaagaaaaattttaaaatatttaagaggcatgtatttaaaaaatattctacatctataagattttgtaatttactttggatttataatatttctacataatgacatttgacaattttttgtttgtttctctaatagtgaatcagaaactattaaagtggccaagatgattttcttaggctctggaagactcaggaatgcatccacttgcactttcccatgcatggggaatcttcagagttttgcagccatgaagttaatatgtggtttcacaaggggaaacagtggcagaccacgcttgaattcggtcatgttctgaatcacttcaggctgcaaagaaaaaagtttccttttagtgtatttaacctaaacatcagaataaggacatcaactttttttggcggacactgggagcatacctcagttctacttaatatactgtttttttgttttggcttgaggccgctctacctaataacccatgtatcttgatctgctgacctttcttctggatcagtatgtctggagggtcgtgaattggtctgtacaaacctatggtaagtgtccttagtccttttggttttcctctgggcaaacaagggctggctcaccaaggacttagaggcttcgcatcaaggcttcagcagagtagcagaggctggtgtgcccacccacaaaaagcctagttacactgccagtttcctcctcttgcaagctaatgtcaatccttctagatgattaaaatacgcaggtaacatgggagagactaagaagtctctctccagtattcagtgctgggaacagatgtggccagaaatgatccattgcaaaataacacaactgttcaaacaggaggcaaaggcagacaagggtagaggctgagtgactagatgttcagggaagaactaaagtagaagctccaacacctggtgacctgaaacttttagttcatcacttttagttcccaatgaacaagtttcttctggccgggcacagtgtctcgtgcctgtaatcccagcactctgggaggccgacgcaggtggatcacttgaggtcagtagtttgagaccagcctggccaacatggtgaaaccccatctccactaaaaatacaaaaactagctgggcatggtggcgtgtgcctgtaatcccagctactcaagaggctgaggcaggataattgcttgaacccaagaagtggaggttgtagtgagctgagctgagatcgcaccactgcactccagcctgggtgactgagtgagactccatttcaaaaacaaaaaacaaaaaacaaaaaaaaccaagctgcttcttctaaatagaaagtcctctgtcagtacaatctaacataacgttatatttcttacttgtggcaaggctggtgcttgtgacaaatttatgtcattttgacatgggaactctccaacaacaggacctataagaaaataaaaggtttaatactttgtacttattgatactatcacaaaagaacaaaaaaaaaaaactaaaccagactcagttaattaaaaacaccgcaccagccccgttcatgtacttctcagatcctctaaaggttgcctgctacccaaggccttaagtacttgtcctgccttctatccagagccacccagtgatggctcatgatattcctgaggtcataaaactttggccacagcagttttagggcccaggtctaatgtgactttctgtccacccagaaggaccttgctaggtttctaaactgttagtaaacttactagttttactaaactgcccagaaagcaagggagttaatggccacaggacaaactttggccagtaaaagccaggaaacgaaaggactgggaagttaacttgcttacccatactccccacatgcagtggttcatgcagcctgtttggagacaccccaacagcaagcagctgtgttttcctgtgatgctgtggctagctcggcattctatcacctggtattgcctctctccttcactacctcatttctcttttccccttatatctgcagaccttatctccagtttccgttctctacctcttttactttctggtgttctataaggcatgtagctatgacaaaggccaaccatcagatggctcaacatgagcctaaaaaggcaacatttgatacttacaagaatccatttccctggcaagaacatggacggataccttatgtctccttggagcatctactgccaacatttcctaggcacaaagaagagcagggtcacccttttgctccactaaagaacttacaatgaggtgttctctgaagactatgaagaatcagctatcacacagtcagatatagaaaagatgcttccctttctggccgggtgcagtggctcatgcctgtaatcccagcactttgggaggccgaggcaggtggatcacttgaggtcaggagttcgagaccagcctggccaacatagtgaaaccctgtctttaccaaaaatacaacaattagccaaatgtggtggcacatgcttgtaatcccagatacttgggaggctgaggtgggaggattgcctgacacgaggaagcaagtttgccatgtgccatgagccgagatcacgccactgcactccagcctgggtgacagagcaagactctgtctcaaaaaaaaaaaaaaaaaaaaaaaaaaaaagaaaaagaaaaagaaaagatacttccctttctttcccctcacttacattattttatttaagctctagaaagatttagcaaggcacgcaagaattattctttttttttcctttccttttcttactctaaggaaagaattatccttaacccaattttacagatgagaaaactgaatccaaggagattaaaaaactgctcaaactcctacagctaataagtgcctgagctaggattaaaaacctagcctagtactcactgggatgggctgtgcagggctgcacttggtgatctttagtgtctacagagacaatggtctgagcttagtcagggacaagcacgagtgcctgctcctctaagaaccttctcagactctgcttgtaaactgtggttcatctaccaaaagagaaaggaaactaacaattactgagtcctgcgttatatcaggcactctcctatgtcagctcacttaattctctgtgaactaagcatcatgatgattcttactttagaggcatggactctaagacacagcagcttacatgaattacatgggtcacacagttcataggtgatggtgtcagaagctagagtctgcttgctctctccattccaccatgctgcttggagggattccccttagttactaccatgaatgccagcagtgctaagttggcaggtggatcctgtggggaagtatgtcccaacctttcccttaacagcagacttctactgtcttttctaaaggggtacaaaattgtgacaaagttcctcttattccttagccacaagcaacgtttcatatccttagaggaaagaaatcatcagccaaaccaaatccactcaacagttatttactaataactgttactagttactagtaactgggcagttactaataagcctggtcctatgtgactgcaaggaagccctgttgatgttgcacagcaatcctgcccgtggctccccactctactccctgccagcaggcaaaacagcccagattctcacaggcctgctctgacctctccagcctctttccaggaactcagcccaggtctgcctctattaacatgtagtacctcatctaagaacttcatcttactggagtaaaaagtttgcttccaaagatctcttctccatctcttgtcacccaaaccttcattacccccttgtctacccacatcagcagacagcagaacaccttctccagtttcagattgttcccgattttctgaccaactctggacaatcctcatttttctaaaaacaaacaactgcaccttcttgcaaactattaatatgttctaaggaacactacagtcctgggagatatttataggtattctgtgtaaaaaaggatgcatggtgaaatcagtttagaaaatgttagtcaaaattaaataaatgcaggctaaagtctttactgtgggacttcttataatttctaaaataccaatacactctgattctctaagaatgcgaatagtctttcccaaacttgtatggtcatgaaacccttttcctaggtacccctattaatatcttgcataccatggaacacagctagggaaatgctgttccagacttagcttaggcctggttataaatactctctctgtttttttttttttttttttttttttttttgagatggagtctcgctctgtcgcccaggctggagtgcagtggtgctatcttggctcactgcaacctccaccttctgggttcaagtgattctcctgcctcagcctcctgagtagctgggattacaggcgtgcaccaccacgcctggctaatttttgtatttttagtagagacggggtttcaccatgttggtcaggctggtctcgaactcctgacctcgtgatctgcccacctcggcctcccaaagtgctgggattacaggtgtgaaccaccacgcccagcccctctctcttttttttgaaacagggtctagctatgtttccaaggttggtcttgaactcctgggctctagcgatcttcctgtctcagcctccccagcagctgggactacaggctattattgcaaaagaacaagagtaatttagatgagacacttcttttcctctatacaatgcaaaggaagccatgaggtaaagaaaatcacttgtccagccatccatttttgtagccaaaatgggtcaaatctcattgctgaaaaaggtgctttcaaaatactggcttctgctgctcagttctgaaactatagtctccttttcttattgttaaggtgatatcagctatattaatacttgtttgcatacagccttaataattttgcagaagagttgctgggagaggtgtaagcaactcatggatgatacaaaatcaccattttcctcaaagaaactatcagcacctttgggtcaaagactgttactttttccttaccctctcactcagcactaggagtggtgaattaaataaacattagaaaccctagtacaggagaaaatgtgatcaagcctcattgtaccactaacttcacaaagtcattctaatgagaactgtaagcactgactcctatgctggtagctatagtacatccctagaaaaaaatactgtagagtatctctctaaaaggatgtgggcacagggcaggactgagtccccgtccaaacaacataatgacagatacaaaccagaaatggctagaacattaagggacaattctaaggtactatggtaatcacagagtataattttgctccttattttgaaaaataggcatatgagtattttacacaaactagaggccccaatatattacaaaaaacatatgtaacactttaggtgcaattccattgcagcacaaattttgagtttttgcatttagcatacttattacacattcatatacctacctaatggaaattttgctatccttcttagaatttttatataggggaagatttagatggtgtgaacctctttttttttttttttttttttttgagacagagtctcgcactgtcgcccgggctggtgtgcagtggtgcgatctcagctcactgcaacctccgcctcccgggttcaagtgattcttctgcctcagcctcctgagtagctgggattacaggcacccgccaccatgcccagctaatttttttattattattatttttagtagagacagggtttcactatgttggccaggctgatcttgaactcctgacctcgtgattcacccaccttggcctcccaaagtgctgggattacaggcgtgagccaccacgcccagccggtgtgaatctcttaaagcttgctgggaagactttaatggtggtgcctccctttctttttgatagacttcctaagtgagcgcaagcatgtaaaacttataatatctctgaccacaattcaaaggtgagtaatcatttattttaaaaagcagccacagtggcacctaaatgggtgaagataatttatagttgtcagagcttggaaaataatctgattctcaagttcttttgttttctttgttcttccttcccaccaaacaagctcagcaatattctttgcagagtagggtggagaacagagagaagaaactgaaagggtgcctaaaaaggtagatctggaagtcaggaagggctgtcacagtccttggtttagagcatgggtcaatcttttggcttccttgggccacactggaagaagaagaattgtcatgggccacacataaaatacactaacaatagctgataagctaaaagaaaaaaaatttgcaaaatatctcataatgtgggctgtacatggcccgcaggctgcaggttcagcaaacttggtttagagggagaggaaaacagtacttggttcaataaaaactatctttattctaaaagtcattaagcgtttgtgtcaaaaaactcaaatccacaaaaacaccttcataaatccagcctgaatggcttcaaagcagcaacacacaatatagcacatacaataggtgttttggtttttttgaggcacagtttcgctctgtcacccagacaggagtgcagtggcatgatctccactcactgcaacctctgcctcccaggttcaagcgattctcatgcttcagcctcctgagtagctgggattacaggcgtatgccactacgcccagctaatttttgtatttttagtataaatggggtttcaccatgttggccaggctggtctttaactcctgacctcaagtgatccttccaccttggcctcccaaagtgctgggattacaggtgtaggccgccatacccagccctataatactttcatatcagtcaaaatctaaatatatgaatttgacttaccttgtagaatttgatgatatcttccttggtaagtgtctttaaatatgcaacctcagtgttatctgaaaaagtaatcaaacaatattttactaacattttcatatgaagcagcccagaacagtacactaaatgacaatatacttcactccaagactcttaagtatccatatatatttttttttgagacagagtttcactctgtcacccacgctggagtgcagtggctcgatctcggctcactgcaacctctgcctcctgggttcaagtgattcacctgccttaagcctcctgagtagttgggattacaggcacaagccaacacgtctgggtaatttttatattttcagcagagatggggtttcgccatgttggctaggctggtcttgaactcctgacctcaagtgatctgtccacctcagcctcccaaagtgccgggattataggcgtgagccatcgcgtctggccaagtattcacaatttttttttttttttgagatggagtcttgctctctcacccaggctgttgtgcagtggtgcgatctcagctcactgtaagctctgcctcccgggttcatgccattctcctgcctcagtctcccaagtagctgggactacaggcgcccgccaccatgcccagctaattttttttttcttttttatattcttagtagatacggggtttcaccgtgttagccaggatggtctcgatctcctaactcgtgatccgcccgcctcgcactcccaaaatgttgggattacaggcgtgagccactgtgcctagccaagcatccacatttttacgtgaccatttgctttgatttcaaataaaagtaagtggatgttggctgggcacagtggctcatgcctataatcccagcactttgggaggccaaggtaggtggatcactcgaggccagaagtttgagaccagcctggccaacatggtgaaaccccatctctactaaaaatataaaaattagccaggcatagtggagtatgcctgtagacctagctactcgggagaggctgagacatgagaatcacctgaacctgggaagcagaggttgcagtgagccaagatcacatcactatactacagcctgggcgacagagcaaaactgtctcataaaaaaaaaaaaaaaaaaaaaggccaggtgcagtggctcacacctgtaatcccagcattttgggaggccgaggcagggggatcacctaaggttgggagttcgagaccaccctgaccaacatggagaaaccccatctctactaaaaatacaaagtggtggcacatgcctgtaatcccagctacttgggaggctgaggcagaattgcttgaacccgggaggtggaggttgcggtgagccggagatcgtgccattgcactccagcctgggcaacaagagcgaaactccatcttaaaaaaaaaataataagtggatgtagtgcaatgggtaagagccttggctcaggagccaggccagcctggattcacatcctggctctctggttatgagcttttggatcttggccagtcacctcaacttttctaagcctcagtttcctcatctggaaattggggataataactacttaataagggctgcagtgagaattaggaaaaagatacatgacaataacactgctaggtacacggcaaatgctcaataaatgagagacagtattatcattaatagtgaatccaactgctagataaattataagtaggctggacgtggtggctcacgcctgtaatcccagcactttgggagcctgaggcaggagaatcgcttgagcctaggaattcaaggctacagtgagctatgatgacacactgtactcaagcctggctgacagagtgagatactctctgaaagaacaaaacaaaaataaaaattatgggtaaggaaactgaggtccaaaaaaggtgtcttgaccaagatttttagcttgttggtgtcagagtaagaacacaacccacatcctctgacttctagtacagcttagcacaatccgttgttaatctatgctctagaagcaaggtgaaaggaagctgattcaagacaagagacttcaagaatcacagctctcccaaatctgaaaggagtgaaaaatctttggagatccctacaggcaaatgtttgaactcctgtgcctcaagggcagcatttgcctcaaaggggttcaatctggtattatctcatttttttagtattatgggaaatagatacttaggtatctgtgatcagaatctcaggatacactgatgaaacaaaaatgtgaaattgaattattaatactttattgtgagatatgggtagatccaggtctaggtttggagggaaaaaaaagagataaggtttctaacagaaaactggggttaaattaagtaacagttctttggaagtgccagccatccccccaccccaactccccaaataggtaacggaatatcacctacaaaatgaataccattttgtagaatggccttaatcaaatgttacttgaatgccataaatgttggagccctaattttaccttacctctgtcaaaattatattgctgggagatgatttctccccagtatttagcacactcagcagatagcttctttggtttgtctagtcgacgaattgctaatgcctgaatgtgtttttggaaggcctcttctgtcatgtcctctatggacttttccatggtaattaagaaagcttccactctgctttctaggtagtgaggtggcttttctgactggatgatgaatctcaagccctgtatgccattagctcgacgtggcccgctgaagacgatatagcctgaaacacagacatcagccagtcatgaccgtggcatttgagacctgggtcatttttaatccttcaaaaactaacctgtctgagcaaataaaatctagtttaaggttttagagtattcacctcttaaagaaatatgagcacttaagatggtttcagttcctaaggacagagcagaagagctctctgaagaattacaaagttggagatgactttttcttcttcttaggaaaaaaatcctattcattattcaaactcccatcttgtcactcctcactctctgtgagttaatcctcttcaatctatgctaaagttactcccagaatataaaatgctggactcattttcatcccttagtgacagtcctagctgtgtttcctttaacatccaagttccgcatatgaacacggctctcctactgtatttcttgttagataatccattcctgaaccaattaattcagaatgcaactctctagagatcaagctaactaaaagtcatacttccatgttatctcatgaggacatgcactaccttccttcaacaccttttcaaaaccaagctcttggcttatctccttcagctgccctgccctgatctaccacctccaacagctgtggtgcctctgggtctcacttctgaggaagtttctatcttcaacatagccattcacagtttgattttctttgagatggagtctcgctctgtcacccaagctggagtcaagtggcacgatctccgctcactgcaaactctgcctcccgggttcaagtgattctctgcctcagcctcctgagtagctgggattacaggcatgcaccaccacgcccagctaatctttgtatttttagtaaagatggggtctcaccatgttggccagtctggtcttgaactcctgacctcaggtgatccacccgccgcagcctcccaaagtgctgggattataggcgtgagccaccgtgcccggccaatagtttgagctcttataataacatttaccatgctgtactaaaattattcctttacaggcctgccatcctgatttgactgtgagctcctcgaaaggaaggaccatccagagcatccattttccatgtccagcacctagcacaatgggtatttaaacaatgatgggtacttggagagactcatccttttttcactggttcctttctgtcattactggggcttctttgagcttctttcctcattgatcaaatctgccagtacctcaagacttttaacagtatctaaaactgggaacacttgctgtgccttctgtatgtcccaggcttgggatataaagacgaatgagagataatacctgccctcaaggaactcaggctttagtgaatctaagctcctctggatggctcatttctcatcttgctacccataagcttgtccttagtatccttttcccccacctaaaatgccctctttattgacatgtatgtaatatgcagtatcatctcataaataattgctttaatgtccataagatagtgattgcttatcttttagaagtggattctctgtaataaggttttctcaagtctctctaagtagaccatgcctgatatacagtgttaggtgaaaatgtggaaaatgttttacagggaaaataattcatcaaagtctacagtaccctgctatttccccactttcctctcacccaactgctccttggtgcgcagggtgttgaagcaaggttccgagataatctgacagaagagctccagaaacatattctctgaggtgctttgcatgtctgtttggtagtatatctcgatgccacagttattgtgaacttcatttctctgctgataaacaaaccatcctcctaggaagtttcaaaaagacagcagcaagttcaaaaacttatttggggtttaataaagtcaatgctatgtctgcccacacttacagatgataatttagacattaatagaaaagggaggtagagaagcctggagttgtatttcattgatttcacttttctgatcatgtccaactttgaccaacagtcaaacttactaattataaattggcagcactaagttccctctcatcagaaggaggggagccagtgccatggctcacatttatagtcccagctacttgggaggctgaggcgggaggatcacttgaccccaggagtttgaggctgcagtgagctgtgagtataccactgcactccagaccaagacacagagtgagaccctgtctcaaaaaaaaaaaaaaaaaaaaaagcagagagagaggaacgtggcctgtaagcctctctccctcacccacctcacatccttctagcctttttgtacttttttttttgagacaaagtcttgttctgtcacccaggctggagtgaagtggtgccatctcagctcactgcaacctccgcctactgggttcaagcaattctcttgcctcagcctcctgagtagctgggactataggcatgtgcccccacacctggctaatttttctatttttggtagatacggggttttgccatgttggccacgctggtcttgaattcctgacctcaggtgatccgcctgctttggcctcccaaaatgctgggattacagatgtaggccaccacgcctggcccttttctttttttttttttgagacggagtctggctctgtcacccaggctggagtgcagtggtgcaatctcggctcactgcaacctccatctcctgggttcaagcaactctcctacctcagcctcccaagtagccgggattacaggtgcctgccactatgcccagctaatttttgtatttttagtagagacggggtttcaccatgttggccaggctggtctcaaactcctgacctcaggtgatccacccacctcagcctcccaaagtgctgggattacaggtgtgagccactgcacccggctgcctggcccttttcatatatattctaaaacatcttctcggttgcagtgagctgatattgtgccactatactccagcctgggtgacagagtaagactccgtctcaaaaaataataacaaaaataaagataaataaaacatctcctttataatgcttgaaaattttccttttcacttgagacagtctgtcactctggcacccagactggagtgcagtggcacaatcatggctcattgcagcctcaacctcctgggctcaagcgatcatcccacctcagcctcctaagtagctacaggtgtgcgccactatgcccagctaattttttttattttaaattttttgtagaaacaagttctattttacccagcctaatctcaaattcctggcttcaagcaatctttttaccttggcctcccaaagtgctgggattataggaatgagccaccacccaggcctgaatattttacttttaaatactaagtgcctttccatggagagttaagtgaagaactatttaaagattcacatctgatcagctggctaattcagcatgatttcctaccacttagcattttgagaatgagatgtgaactgggctatttttgaacatggagaaatttgggagggtacttaggaggcaaaagagattaagatcctaggaaaggagacagaaagagggaagtagagtcaaaagaagtaagaaggatgaattgcactttgaaatattgtttctacactggcctcactttgaagtcaactgttatggctcttgcatagaatatcctgagtctttctctaattgtagtgggatcagcacatcctgagtcttgtcctggttttagtgactgaggaataaactggcaaaagttggaaataaaccactaccagatctgtgatgactggtcatgcacaacagcagagctgggctcaacgtatctctaagcattcaacaaaggtatcctgaagtaataatatgttccagttgctttagaagctactcaaatgaactagacacagactttggctttaaggaatgtacagtctaacaagaagatggagatgcacttcaatcccaacacaagagaagtgctaagtagcttgaatagggaggttcagaaaaattgtgctgcaagtccagaggtagatgtgattatttctagctgggagttttagaaaaagtttagtggaataagtagcttataaaataggcctggaaggagaagtaggatgtaggcactggcccatgaagaagaagggggaaaggagaacaccattttgggaggataaaatagctggggggaaaaggcagcacagatggttcatgcatagggaacaaccaaacaatcaagcttggccaaaaaaagcttctcttccttcatttaatataccttctattacacagttttgagcaatattgacaataatgcttaatgagtttttatcagaagaagccactgttaatgtaaaagtaacccaacattgtaaaccccaatatataaattcaataaaagtctttgttaatcccttataaaaatatacttgtaatgattacatgttatctgcacctgtgggtttcctaaaactatttctgccaaagaatcctatgggtttccaattaaatattataattccagtttccatttttataaatgtattttatttcatgactcatagtcaatacctttgtgatatttttacttcctaattccccttcattcaagtacccgtcaattccagtatcattctcttcaaaattattgcctatctccaattttacttatttggccctcctaccaaaaatttttttggcagaattacctatctctaatcataattctgtaaataggagaggttcccaagtaaatctttggcgtaaaactataccaaattcagcccacctgtaatcacccacactgttatgtcaaaatagtccattcccaaagttacaacatctctacttactgtcagggagctgaacttctctataccgaaccagctgacttggaaggagaggtttggtatgagcatgttcaatgagggtgtcttcaaccatctgcataattcctaatgcagcctatggaaaaagatatgtcccagcatattacaaaaacataaacatatcttgtttgtgaaataaactggctttgtttatcataaaagtggattctaaaaccttaaatatatttgatcctattcaaatggataaaaattgaatttgtcagtatggtcattttgcaatagagtcaatatggtagtggtgaaagaaacagacacccaaacaatcatcaacactgatgctgatgctggaaaaaaggcactgccaaagatggtctcaagtgaaatgatcctgactacagacacctggggtcacagaaaagcaagggaggcaaacataggctttattgtaggtaaaatgaccttggtaagaatcttgcttctgccacttattagcatctgaccttgggcatattgttctggagggggtatagcagagtggtagagaccaagggatcttttcttttttttttttgagacagggtttcgttctgttacccaggctggagtgcagtggcacaatcataactcactgcagcctcaacctcctaggctcaagagatcctcttgcctcagcctcctgagtagctaggactacaggcatgcactaccacacctggctgtttttcaattttttgtagagttatgttgcccaggctgctctcgaactcttgggttcaagtaatcctcctgcctcagcctccaaagtactgagatgataggcgtgagccactgcacccggccgagactgagggatcttgagacagactgccacggaaattttgtagtgctttccatgtgctaagtacttagcatgtactatttaatccttaccacacatgacgtaggtgctactgtaactctaattttacagaaaagaaaacagataagcacagagttaagacattttcaaaagattacagatctagtatatagcagagccaggatttgaatccaggctgtctaattctacagcacgtgctcttatctactatacaattatgccaccctatacagagtagggataattactcccatttcctcctatgattgcacaaggtagaaaacagcagaggaggcagccatgaaagttaggtcctcagttaatcaccatcattctactttccctgtgccctctaccttcctccacagagcaagagggttgagtaaactctaatgtgttccttatcacaccatgctggttaacaatcttgagaaagactagagggaaaaaatatcttgcaatgatccacaaaagattgctaaaacctcaaccacccacctgctttgttatgtttccatggagaagggcttcaatgtgcagccgtgacaggagctgaggtatgaaggccttaaggcgaggaagggttacatctgcaaaggtgtaagaagacatagtgagcgctacctatgagggattttttgtttgagataatttgagacttacagaagacttgcaaaaatagtacacagagctcctgtaaacacttcacctagttttccctaatgttaacatctttcataaccatcaaaactaagaaattaacattggtataatactattaactaaagtacagactttatttggatttttcccatttttatctttttttttattccaggatttgatccacaaccctccattacatttagctgtcatatgtctttagttccctctaatctctgacagtttctcagtccttccatatatttcatgatcttaagacttttgaagagtactgttcagttattttatagaagtcccacatttgggtttgtctggtgttttctcacaattagatttcatgtctgtattaccacaaagaataccacaaaggtaatgcgcctttctcactgcattctatcaggggactcatgaagttgatatgttgtagtactagtgatgttaaaactgatcacttggttaaggtggtgtctgccagatgtcctcactgtaaatgtattattttattcttttatttataatttaataactcatatgtgctctatatgcaatttggaaaagcccacttgcccatctacacctatttttccctttgtaattactaaatatttattttgggaaaagtaaatgagattatacaaatattttctttttctttaaatttgacccactaattttagcatccattggtagttattgcctgtagcaattattactatggagttctaatggcaatttttctatttccctctttctttttacatatattaatttaatccttctgtaaggaagagctgtcccttctccattaggacaccatagtaataactgctacatgcaagatctaccaatggatgctaaaatcagtgatagacatttaaggagaaacatgggaatgcaaataacaagtgcttaccacagatcaggaattttacagatgttatctttcacactataaagtagctactattatccccactttaaagataggaaaatgaagttaagaaaatttaagtttgttgttcaaagtcattaagctagtaaattgcagagctgggatttgatccttggtcaattccaaagtggatgttcattctattccactgtactgccttaggggtcctcttcactaggctccctcggcactctctgcagctttccaccacaatacttacccccttgtctctctctattaaaatgatctacttacatttatgcttcaccaccagactggagctccttgatcaaagaaaccccatctaattgatcattttaaatttttatttatttatttttgagacagagtcttgctctgtcacccaggctgaagtgcagtggtgcaacctccgcctcctgggttcaagcgattctcctgccttagcctcttgagtagctaggaatgcaggcatgcaccaccacgcctggctaatttttgtattttttgtagagatggggttttgccatgtttaattgatcattttttaatctcaagcacctgcagtcttgggctgggtgcatggcaggcagtcagtaaatgctgctggaccacactgaaccctgaagttcttgctaccctggcacctggatagctgaatgatttagagtcactgaagaggcagcctctcacactgagttgtttccaaattaagccattctggcattttggattattgtaggagtatatatatcaaaatggaataattatttacttgagcagaaaatttaaataaaaaaagaactgactattctctttacaaaatccattttaggaagccttcatatccctctgagatactatagagcttattctgcttaaaattaacatgccatctgacctagattctaacgaagggtgaataaaaccctcaaacctttgctttttgatcattataaaagtaggcttcgttttggaaaacatttaaaattaattgtgtggtatttttaaaaggtataattcttgctattaattgcatatgaccataatcattttgcaaagaaaagcatattaactgtcctgataaaaaaatgtacctgttctagtaagtgatttttataatctagtctcctatccaatgcctgaggcaatcaacaaaataatgactttcagtactttgctcgatttgtgtcactgatgacatcaaaagcatagtgttacgtaagtataagaacttgtcacaaaaggttattaaaacattcaacagaattctttttttttttttttttttgagatggaatctctgttgccaggctggagtgcagtggcacgatctcggctcactgcaacctctgcctcctgggttcaagcgattctcctgcctcagcctaccaagtagctgggactacaggtgaacgccaccatgcccagctaatttttgtattttttgtagacgtgggtttcaccatgttggccagaatggtctcgatctcttgaccttgtgatccgcccgcctcggcctcccaaagttgctgagattacaggcgtgagccaccatgcccagcccagaatttttttttttttttttttagacaagagtctcactctgtcgcccaggctggagtgcagtggcattatctcggctcactgtaagctccgcctcccaggttcacgacattctcctgcctcagcctcccgagtagctgggactacaggcacccgccaccacgcccggctaattttttgtatttttagtacagacggggattcaccatggtctccatctcctgacctcgtgatccgcctgcctcggcctcctaaagtgctgggattacaggtgtgagccacggcacccggcccaaaattctttttattgcattttaatgcttatggctgagcacataggaagaaagattaattggcgaggtaatgttgagaagtaaaaaatctaaaacaataataaagggtgataccaatctacatttttttccagtaaagaaatcctgaaagtaatttctttacattcaataggcattcattagatacacactgagggcataatattatactagatactaagtaaaggggtatggaaggcaggtataatcactgctcttaaggaattttggattttcaagccaaactcctgaaaattagacttaagattctagggaaaaaaacaacaaaagatgactctttaggctttcacattttccaatttttaactgaactgatctaaggatgctaaagcaggaaaaaaaaaaaaacctgaacattgtgtgttaagactttgaagttcagctaactttttcttaaaacttcaatattggccggtcgcggtggctcatgcctgtaatcccagcatgctgggaggccaaggcaggcggatcaccggaggtcaggagttcaagaccagcctggccaacatggtgaaaccctgtccctactaaaaatacaaaaagtttgccaggtgtggtggtatacacctgtaatcccagctactcgggaggctgaggcaggaaaactgcttgaacctgggaggtggaggttgcaatgagctgagattgcaccactgcactccagcctgggcaacagagcagactccgtctttaaaaaaaaaaacaccaaataaaaatccttcaatattaacaaggttagtacttgggtcagagcatttagtctgcagaaaaaaaaatttttttttggaggcagagacagagtcttgctctgtcatccaagctggagcacagtggcgtaatcatggctcactgcagcctcaacttcccgggctcaagcaatcctctcaaccacagcctcttgagtaagtgggaccacaggtgtaagccaccatatccagctaatagttttattattttttgtagagacagagtctcactatattgcccagggtggtctcaaactcctgggatcaagcgatcctcctttctccgcctcccaaaagtactaggattacaggtatgtgcaacccagcccttctgcagaaatctaaaagtagtaataattaactggtgtaggtccagattgaaaacagtaaatgtggctaacctgcctgaatgcaaaaaccacttcaaagccaccactgtttttttacattttatttttaattgacaaataataattgtagatattcatagagtatataatgttattatatatacatataatgtatagtgatcacatcagggtactaagcatatccatcatctcaagtttatttatcatttgtttgggttgggaatgttcaatatcttccttctacctatttaaaagtatatgttactgttaactatagccatcctgcccaccactgtttttataaaacatatacacagccagctttaatagaactacaagttatttaaaagtataaacagtcaatatcagaataaaccaaaatgaatttaggaaaaaaatgaagaaagcattaagctttaagtagaaagtctcaccatccagagcttcttttaactcatctttagtccaggccacttcagtcatcagcaagcggaggtagtacatggcatgctggtgaggctgttcagcccggaaattgttaagagatcgcatatactagtgaaagagacatgcgttcattaattttataaatcttttaaaaatcatttcaaaagtccagttataatcaaatttcaattctctataaactgtattactaggatattcccttctttcccctttctgaagttatataattaagaatggggtttattcctctccgatctttacataaaagtgcatgctttttctttgtccaagctacatttgttcagcatctgacatggactataagtgccttcactatgggatatctttagtccctcagaaagttatccctagttttcagggaagtcttttggaatctttaggttctacgctataaagccatccccaaagtctccataagcaagcaacataaataggtagccatataaaatatggaatctttatttgaaaactgatggtagtttcttctagtatacaaggaaaggtcatagtttagcttcagaagcagctgttcatcccatacttccattactgggccaaacatgaattgaatgtaagtggaagatatgtcaaacccaaatagtgtgctctaatgtgacaaggtcttgaggtaaagcagacctcagtctgctgaattgcgtgttcttctgaactagaggttgggatggaacattcaaggaggccctgacagccactaagtgcttctctttgaaattcagagctgcaactctgaattgcagtgagctcttggcacccacagagaagaggccaggtgtccaccagagtctactaggatttctttctggatggagtataggattttgcaatgacaaggtgagatgaatgccacagggttatgaattcttcttttcctccttgcttcttttatattataaaaactattatgaaaactttttataatatagcaatattatcttatgaataaaaaagcagggttcagaaaacttactgcttctttgataatttcaaatcttttttcatcaatctcaaaggtagccattttctcaataatcttctttagtaaaattggctgcttgtcattgtaacctttcactgaaagctacagaaagaattcagggtattaaaagtctaaaaatatcacaaaacaacttccaaataaacgacttgatttttaaacatgtagaaaatcccaaaacagacatgtaaaaaatgaaacaaattcaatttaatgtgtcataaatatatatagtgtaacacttaggaagataacattaaccatctttttttttttttttgagacagagtttcgctcttgttgcccaggctggagtgcaacggcacgatttcagttcactgcaacctcagcctcccaggttcaggcaattctcctgtctcagcctccagagtagctgggattacagacgtgccccactacgcctggttaatattttgtatttttagtagagatggcgtttcaccatgttagtcaggctggtcttgaactcctgacctcaggtgatccatccgcctcggccttccaaaatgctgggattacaggtgtgagccaccatgcccagccttaaccatcttttttaaaaaatatatttatttattcgagacagggtcttgctagggtacccaggctagactcaaactcctgagctcaagtgaacctcctgcctcagtctcccaagtagctggaactatatgtgtgagccacagtgcctggccattaacaatctctatacccaaaagcataattttacttttctgaaacaaaaccaacagtaagtaaactcacctgacaccgaactatggtggcatatactatatcatcaaaactcaaattctttttataaaattaattgtagaatgtggctaagttttttcttcaaaaagaatatctaatgaaaggcagacttaaggtttctacaggtgaggtaagaagataaaaatcacagggcatagtggcacgtacaagtcgtcccagctacttggaaagctgagatggaaggcttgctttagcccaagagtttaagaccaacctgggcaacatagttagactcctgacctcaggtgatccacctgcctcggcctcccaaagtgctgggattacaggcatgagccaccgtgccaggcaggatccacaattctaaccacttgcttatttggtaagttctgttggtgttccaaaagctaatggcaaaacaaatgtgtaaaaaggatacactgtatgtatcatcaggaccttggcttagcacatttttttttttctgagacagggtctggctctgccacccaggctggagtgcagtggtacaatctcggctgactgcaacttctgctccgcaggctcaagcgatcctcccacctcagcctctggagtagctggactacaggtacacaccaccatgtctggctaattttttgtattttttgtagagacagggtcttgccatgttgcccaggaggctggtctcgaactcctgagctcaaagcaatctgcctgccttggcctcccaaagtgctgggattacaggcgtgagccaccgtgcccagccaacttagcaaaatttactttgtctctaaatgcctaacattttgaaaagtggggaatggagaatttctatcatgatatttccacatggtggcacgcaaagcagtaggggatatcactgcagctagaatatcatgaaagtctctacgctgtacaggatgataggcaagaacctcagcaggagggaaggccactggccacggcaagcacatcatttttcctactgtaggaactagactgacaattagcagaaaacccattttgtcataaataaaaattatgtgttttgatggtaatatgctactaaaaatcaacagaaaaaagagaaaacagatgattacttttctatttggagctaattttgatctctgagcttcaaacttctgtggactctgggaatggttagattaataaacattcttatacattaaacaaaagctaccagagaatttatttatgtgaagaaaaaaaagtcactggaaaataaataaaatttaaaattcctacaatcttttgtgtaagaatttaaacaacgagtaccccaaaatgctcttgttttcatttttactaaaatatgcaatatattttcaagaaaagtgaagatgaatgtgtgccataaaagggatgttaactcggaattgagatataagcaagcttggaaacacattccaaagaaaggatctagttatttcttagatggatttaataaatgcttattttaaaacacacataaagtaggtaatggtgcatgctacaaaataagttttaaattaaaatgtcagatgtatctgaacatagaaactttatactactgtctgcagaaataaagggtgcctatttataagtaaaattcaatcaccacaacaactatggatatcttctacttacggatgttaatatactcaattatatagaaagaacaatatgctttcaggattaatatgttaaacatctcaggcagaagagcatgcaaataaacgtagcacacatacatgttcacaagatgcactaaactttattaaatcattcattagtggaactaacactaatttgagttctttgatcatcaaaaagatgcaaggaaaaaaaccattaactttcttgtttaaaaatgcgaagttaatagttttcccaagctcaacataatgcttaaacggggtggtgccttttctttggttttcattttacttacaagtattgcattcattcctgatgcaatgccatagctcaaacctgagaggcgtgctgcatatgtatactcttttaaatcatccttcaataacctgataaacaggtatgtcatgttgcaatggagaggatcagcataaatgtagcgactaacaaaaagaaaaacaaaagaaatgctttgatacctcaagcagtggcatggtaatgaagaaacatgaccgaagagtatggatatgcagcctcatgatctggatttctagggaaatagtatatgccaaccttaggttttacaaaaggaagacttcattttcctttgccaaagaccaagatttcaaatacagaatgggtaagagctaaacctaaatcagggtccaattttgtttgagtagaaaaatatgacattctgatgaaagacgtttaaaaaaaaagaaatcaaggaaaatttgcataatatgaatggtatgtagttgaacacttagaataaaagctaacttaaaaattaaatgagaaaatatgattagccataaagattaaaaaaaaaagaaattaaactcacaccctcaatcaaaaaatgcttccatcaaatcaatataaaaaatgttgatgagtggaaggctctaaggcgtgggtacttacatacatcccatagatggtattttggagatcatagctcaagcctgctagctctgctgcatatgcatactcgttgagtgagtctttgaggagctcaaggtacaaataggccatgttacagtgcaaggggtccacataagcaaatgggctggaagaaaatgttgacagtaaaatagctgattttattacttctcaatgtgatatggccttttgagatggatcaagatattgaacaccggttaatatgatttcctgaggatatggttgaattcttgaggctatttcttatgaggaaaaaaaagaagatgtctgaaaaagaagcctgaagtgtgtgtgagtgtgtgtgtgtgtgtgtgcatgcgtgcgtgtgtgcgtgcgcactggtagtagtgaagaaggagaaggaactgcctaccccagatggtgtggcagaactgacaagttagaaatgcagggtatgtgagcagtgggaacgggccaaaatgcatggctgtgcttaggctaatgggaggagcacggccgacagaacagatacagcatttgcatgtcttccctctctctccaataaagtcacatccttggtggacaggaataaaggactgggaaatgtgtctgtggtaattacatgaacttagaaaaattgagacctgtgaaaatgttagcttatccctgagttttccccaaaacagtaaagctagagaactgtcagtaaaataattgataatttctatcatataacagcagccaaaactagggaaaaataaaatagaaaaatattttaatgagaaagaacaaagaagaaagaattatagagtacaagaactaaaccaccacagtgatcaactaaacttcatttcccagataagaaacataattttcttcaggtcccctgagttcgtggcagcagagctgggattcaaatgcaagttaaatgacctgctcctttgactatacaaccttgcttaccttttatcagaagaaagtaaaggtctcactcattcaacaaatatgtattatatgcttactacagtgccaggctcttctctaggcactggaaataaagagtgaacaaatcaggcaaattccctgacctcagagttgataatctagctagaggggacacataataataaatttaaatttgacatattagttggtgacagtgctatggggtaaaattaagcagggtaaggggaatagggaatgatggggtgatggcagcagggaagaaagactgctgctttacataagatggccagtcaaggccactcttacaatgtgacatctggactcagacctgaaggaggcaagggagtgagccctggggatatctaaggggtggagtggagaacttcccaggctgaagaaatagctactgctaaaggcctgaggcaggtgcctgcttggcttgtttggcagcaaattaaaagtttcactctacttgtagcacagtaaatataactaatgtactgataacaaagtcaacattttgttttttaaagttgagtcaaggtctcactgtgttgtccaggctggtctcgaactcctaggctcaagcgatcttcctgcctcggcttcccaaaatgttaggattacaggtgtgagctatcgcacccagccaaaagccaacaattttatcaaagctgataaaaaagcaaaaatagggataaaatgtgtagtcacttagagaattaaaatcaaagacaaagttctacagctatccaaatattctccaactggaaaatctgaataaatgttctgccattaaattttttaaggtatgatacatgatgacagatttccttcttttggcaaatagcagctcaaaaacttaaggcacaattcacaaaaacaaaatcatcaaaacaaaagagaggatatcacagaggtcggccccacaggcaactatgcacctttctcaggtggaagtgaaaagccagaaaatccaagttttgggtctcaaagcactatggctcaggctcagaaaataattccaaggagtgtcctaaaatgctacatccagcctggcaaggtggcatacgcctgtagtcccagctactcaggaggctgaggtgggaggatcacttgagcccaagaatttgaggctgcagtaactgcactccagccttgggtgacagaggaagactctgtctcctaaaaaaagagaacaacaaaaacagctgtatccacagcagctgtgctggtgaagtggagaagaccctaaactaacttttaaaagagaataggattcaactgggatacctaaattctggttcatgtgttaattttaaaaatacgttattttgtaaccagatactatatgcttaaatatggatcacagggttttaaaaaccatagctaactacacataatataatcttatttctgaaaagatggaaaggatatagacacacacatgaaaatttcaattaaaatgtacaagaaacagaacagtggttacctctaggaagacagaccagagggagggatttgtgtgggaggcagacattttcagttctaggaaatgcgctaggcagtttagagaacacaaaaatgtaaaatggtctctcaaagggtagtctaaagaaattcatcatcatagaggccaaatggaaaagtggtgacaagctgcttagagtgttaaaaatatcactctcaaatatcaaaaaataaaaagcagctttgtaatgccctttaccaataataagccacaacctgacagcccatctttggtgtaaacaataaaaaatctctgcacagttctagataatctgtgaatctcatgcaataaaaccacaatatttataatcactataatctcaacatatttgttgatggaaaatcaaattcctttccctctttccaaagcatttaaaccttatctacctctaatttcatgtcaagccaactgaataaaaattaatgaaaaagctgattatcatattgaacattactgaacaaataaaccatgataggcttatcttacaaaccactgaattttagaaatataaaattatgaagtataaactcacaaagtaaaatctgaaacaggtgattaacacacaaataagtaaaggaagacaaagatgaattgaaggtgcactgagaaattactgcaatagcattattcataaattttactaaacatcttctccctttttattagtaatgtttaagtaatcaagccagaaatagaggaagcagtatctaagggttccagacaaaggacaaaacaagactcaggatcatttagtaactagtacctcctcttctagacaagttccaggaatacaaagccaaagcaataaaaacaccccaaattatttattctttcttcaatgagtcttcttctgggtaaatctacggcctcctcagaatccaaaaccctgaaggctaagaaggtcatcctaacaatagctaacataaatcatttcagctaaagggcatactcattaatggggaaagaaaaaaaaaaagaattaacaacactggtttttaaaatacctcttaacagcaacagctctccttttttttcttttcttttttttttgagacagagtctggctctgtcgcccaggctggagtgcagcggtgcgatctcagctgactgcatcctcctgcctcagcctcctgagtagctgggactacaggcacccaccaccatgcccggctaattttttgtatttttagtagagacggggtttcaccgtgttagccaggatggtctcactctcctgacctcatgatccgcccgcctcagcctcccaaagtgctgggattacaggcgtgagccaccgtgcccggccaacctctccttttctttacttttatttatttatttttttcagcctctccttttctaggtgaaataactctaattccttttatttctagacatggatgtttaagaagaacagacaactcctggaaacgtaattgttgatttttataagctttataagctagattcatcttacatacctgaaaaattcaaagttgagacaagccttcggcaaaaaaaacttatcatcttgtttgaaccaaagtttgctcatagctgtatcctgtgatggagaaacaatttggttagggaaatagaggcgcattcagcaaaaatgttcaatcaaatcactcttcaagaggaggaggacagaagcaatagttagagttttgttctggagttgctgtcccatgggccttgaagcatactcaagagtcagcaggtaggaagctggagacaaagactgcagactcctgtagcagagtgaaatctgccttctatttcccctgtattagggagatgggggtacagtgaaggaagagacagatcagagaagccaataccaactgtcctgtcttcgtctttctggacactaggaggaaggcagaggcagaagtcccttgcaagcgtatggcagccagcttccagggtggcccacaacaatccttgcctgctgagattcacagccttgggtggtcccctcccacactacaccagggttggtctgccttactaacaaaatatgacagaattaatggtatacctctgagactgcattataaaagacaccgcggcttgcatcctgatcactcactttccctcctggatcactcactttgggggaagcctgctgccatgtcaagcaactctacagagaggtccatgtggtgaaaaattaaggctggccaacaaccacataactgaacttggaagagaattctccagccctggctgaaccttcagatgactgaaaccttggccaacagcttgactataacctcacgacaagccctgagccagaactacccaactaagtcactgctggattcctgaccctcctcagaaactgtgtgagggccaggcgcggtggcttcactcctataatcccagcactttgggatgccgaggtgggtggatcatgaggccgggagttcgagaccatcctggccaacatggtgaaaccccgtctctactaatcatacaaaaatgagcagggtgtggtggctcgtgcctgtagtcccagctactcaggagactgaggcaggagaatagtttgaaccaggactcgggaggcagaggttgcagtgagccgagatcatgccactgcactccagcctgggcaacagagcaagactccatctcaaaaaacaaaacaaaacaaagaaactgtgtgtgagatacggtgcagcagctcacacctgtaatcccagcactttgggaggccaaggcaggcagatgacttgaggccaggagttcgagatcagcctggccaaaacagcaaaaccctgtctctattaaaaatacaaaaattagttgggcatggtggcacatgcctataatcccagttacttaggaggctgaggcatgagaatagcttgaacctgggaggcagaggttgcagtgagctgagattgcaccactgcattccagcctaggcaacggagagagactctgtctcaaaaaaaaaaagaaagaaagaaaaaaagaaactgtgtgtgagaaaccaggcatgatggttcatgcctataatcccagaaatttggaaggctgaggcaggatcgcttgagcctaggagtttgagatcggcctgggcaacatagtgagatcccacctctacaaaaatattgaacaattagctgggcgtggtggtgggtgcttgtagtcctacgtacacaagaggctgaggtgggtggatcactttagcccaggaggccaaggctacagtgagccatgactgcaccacttcaccccagcctgggcaatggaatgcgagtcttttaaaaaaaggaaaaaaaactgtgtgagataataattgttgtgggttgtttctttttctttctttctttctttctttttttttttttttttttgtgacagagtttcgctcttgttacccaggctggagtgcaatggcgtgatctcggctcaccacaatctccacctcctgggttcaagcgattctcctgcctcagcctcctgagtagctgggataaggcacgcgccaccacgcccagctaattttttttagtagagacggggcttcaccattttggtcaggctggtctcgaactcctgacctcatgatccactcgcctcagcctcccaaagtgctgggattacaggcgtgagccactgcatctggcctaacttaaatgttgtggttttaagctgctaaattttggaataatttaatatgcaaccatggataaccaacatggccaaggatgaacaaataagctacttatcttgcctctccacttcactcatgctatgctaagaatggctttagtcacttgaaactaccttgaaactctgggaagagatataaatggtttaatgttctcgttagtttgctctgggaaggcctatttaaaacaaacagcaaaagtcggatatggtagctcacacctataattccagctacttgagaggctgaagggggaggatcacttgaggccaggagttctagaccagcccaggcaacatagcaagatcccatctctacaaaaaattaaaaacaaactagctgggtgtggtgtgcgtctgtaatccagctacttaggaggctgaggccagaagatggtttgaacccaggagtttgaggctgcagtgagctatgatcccaccactgcactccagcctgggcaacagagagaccctgtctccataaataaataaataaataagataagataagataaacaatacataaaaaacagctgaggtaaatgaactttctctttgcataagctaatataaaactctttaaaatgtcatttttaaagaaaaacgggtccggcgtggtggctcatgcctctaatcccagcactttgggaggccgaggcaggtggctcccctgaggtcaagagttcgaggccagcctggctaacatggtgaaaccctgtctctactaaaaatacaaaaaatcagctggatgtggtggcgggtgcctgtaatcccagctacttgggaggctaaggcaggagaatcacttgaacttgggaggcggaagttacagtgagccgagatcatgccattatactccagcctgggcaacaagaacaagactctgtctcaaaaaaagaaaagaaaataaagaaaaatggttgtctcattaataatctagttgcttaagacaaattttagtgttcctaaacactaattgttatctcattgaactcatctaaattcttccaaatgttaggtcatctgaagaagataaaaagaaacatctgtgtgtgtgtgcctacagtcatgagtttagaaacagtttagaagggagaagaaatacgtttagaagggagaagaaatacgtttagaagggagaatgtgctgtaataatttgatacaattttttacatactttactcaagttctgaaataatagcatgaaaaggacattctgaaaaagatggggagggaaccctacttctcaacagccctttgcactagtttatcattccattaatttgagatagtcactatgtcataatgaatgtttttaagggcaggaaatccaacagctccccctggacttgctctctttcaggctttagagatcctttcttatctttaatgtccatgatgcagcataaacctacttccttattgggtcttcagcagacatggaaaagaggaacagacctttccacagacttgtggttacagctcagacttacttttttctcctacaaagaaagtgattccctagattctacactgtttagttttgtttgcttgctttaatatttttaaccttctaatattttttgtagttattctttctgcagcttttttgtcacctattaggatgtgagcctccccaaatcaacatagtaccaaatgtaagaaatcatttacccagtcccccatgtattaggtctgtcccccaaatttaaaatcactgattcaaacacattaccttaataagagcagggtatggtgtcgcctctttttctaacggtaaaatctcaaaattcgtaggaataaattcattctttgtaggaagtttaaatttcccattcaggtcagcattttgccatttctggatgaataatgaaacacacaaatgcagtaagagtctgatttaagagtttaaaatagtatctctgctcaatatatgggcaaatattaagtgcacaaatgtcacacagcattgttttccatcatatataaaagaggtactaccaaatctatcgatgggttttcctgaaacctgagttagtctttctagtactagcaaagattttgcactcatatatctactcttcctctccacatctccaaaatgaccagctgaggaacaattgagactatggaacacagaaaagctgactggtccatatgcagatcatgtttattctagctctttaaagaatggagaataatctgctcaggaatatattcccacaactgctagacaataggtcatttatataagagccatactttcagctatactaagttatatccatgaatggcctgaaagccaggctaaaggaggtgtctttcactttagtacttctctcttttttttcttcctgagacagtcttgctctgccgcccaggctggagtgcagtggcatgatctcaactcactgcaacctccacctcctgcgttcaagtgattcttgtgcctcagcctcccaagtagctgggactacaggtgtgtgccaccacacccgactaattttcgtatttttagtagagattgggtttcactgttgcccaggctggtcttgaactcctggcctcaactgatccacccacttcagcctcccaaagtgctgggattacaggtgtgagccaccatgcccggcctcacttcagtacttctttttttctttttcagacagaatctcactctgttgcccaggctggaatgcagcagcgtgatctccactcactgcatcctctacctcccaggttcaaacgattcttgtgcctcagcctcctgagtagctgggattacaggcgtgtaccaccacactcagctaatttctgtattttattagagatggggtttcactgtattgcccacgctggtgtcaaactcccctcaatctgcccacctcagcctcctaaagtgctaggattacagacatcagccaccacgctcggctttcagtacttcttaagaactggcccacacctctcccagatgatcatgtgaacttttaagtgaaccagtagttcaagcacaaggttaagaacaaagttgaggccaggcgcggtggctcacgcctgtaatcccagcactttgggaggccaagatgtgcagatcacgaggtcaggagttcgagaccagtctggccaacattgtgaaacctcatatctattaaaaatacaaaaaattagccgggtatggtggtgtgcacctgtaatctcagctacttgggaggctgaggcaggagaatcatgtgaacctggaaggcagaggttgcagtgagccaagatggcgccattgcactccagcccaggcaacagtacgagactctgtctaaaaaaaaaaaaagaaaaaacaaagttgagatttaggttgggattcacacaacctgtagtagactggatctgtttcctgttctagttccaaaagctaagtgggacagatcacaggccactgattgttgaacctaatttataaggcttttcattatttaaaaaaaaaaaaaaaaaaaaaaagcaactggccaggagtaaaaagcaaccagcctggacaacagagcaaggccctgtctatttaaaaaaaaaaaccaattgtcaataattctggatttctggattcagtaatttgatctctagctggtgtggcacagccttgcagattttacggttcttagttcctgcatttgtgactttcggcactggggacgttggccatatttcttaagtggtatcttaggtttccagaacagctgaatactagggactaggaaacacttagtaagtaatttcactactgagttcccagatagatgtgttcttaaaaaattcccagccgggtgtggtggctcacagctgtaatcccagcactttgggaggctgaggcaggcggatcacaaggtcaagagatcaagaccatcctggccaacatggtgaaaccctgtctctactaaaaatacaaaaattagctgggcgtggtggcatgcgcctatagtcccagctactcgggaggctgagctaggtggaggttgcagtgagccaagattatgccactgtactccagcatggtgacacagcgagattccatctcaaaaaaaaaaataaaattcccattcagggcaggttggttatggtcagagtccagtgaacagggggattctttcttcttttaggactatttcagacccagcactaattcatggaagatcagctttcctctcagtttagagagatggacattttcacacactggagggcttcaatgatcttctgtatcatgaatatgtcagagatctgtgaagtaccagtgatgatcttctttcttaaactaattcctttttttgtatgtcattacacaggtacatttttaaaatgtccattacttgagtttaactagaatctagcctgagtaaagttttctggtcttttcccaggaataagggacgcagtctcaaaggcacatagccaatgagaaccaaaagagaaagaaagaaaaagtactagataagtaggtaacattcacaagcaaaatcctgactactgatgaatgggacaaaatattgttttaacataccttttctgaaaatcataattctcctatgttgacaaaaagaacggtgctataacatgaggcataaaacatagcacctcctgaagtgaagatggtatgaatcctagagcctgctctcagcctgtgttcacagcaagactgtgagctctttggagcccttgcattggtttctcatgcttcctacttccatcgcttcttgcctttctggtgcctgtgcccatgtactctgcactttagttacattttatggcatgaggcacaaccctggtggtttgatagacacatgagaaggtggctagagtaccatgtcttcatgaaaaggctaaactccagctccctatctacttgttgatttctcttaggatggtacagataacactaggtcatcagtcttccacactctggggccttagttggtggatctagggagcaatgttcttgtgattcctcacatgtcaggcttattcatagatgagttaaccctaccttgatgacttcatccggtatagcttcttgtttgtactgggttccataccactcttctgtgcgatcagtttttccttcaaaagatttagaaactatggcaaccctagagatagaaaaaacaaacaaaaaaaccctgtaaactcatactgtatatatgaatttaaagaacctgactcaggacaatataaacaatatccaagaatgtgctgggcctcttaagacccagcaaatcctgtaaggcttagtccaaacaagcaatacatgaatagaggtttctgatcatagtccctgttatcctttagttacagtccattatttttagtatgaaaaagtgctcgcaggagagattcctctaggttgctactgactaaaatttaaaaagaagagtagctaggggaaaaaaatgtaacaaggtcagttaaaaacagtcagttaaaaaacagtcctaaaaaaagcaaagaagttgcggatgtagtggcttatgcctgaaatcccagcactttaggaggctgaggcaggatgctcacttgagcccaggagttcaagagcaatctgggcaaaatagtgggacccgtctctacaaaaaattgtaataattaaccaggtggggtggcacgcagctatagttccagctacttggaaaactgaggtgggaggattgcttgagcccaggagtttgaggctgcagtaggctagaatcacaccactgcactctagcatgggtgacaaatcaaaaccttgtctctttaaaaaaaaaaaaaccaaaaaggcaaaaaaagtactccttcctaggagtatctcaggtgcagaattaacaggaatgactaataaaacctgctggctcatccagagattttaaaaacgtgacacacatacccaagaaacttttattattgcttgctacatttgtgctctatgtttttttccctgccagagactagcatcaaatatgtctactacaaatacacaggccttcctgctactaggggagaaagggacaagaccaaaaaatgtctaccactgtaacctctgcctcccgggttcaagaactctcctgcctcagcctcccaagtagctgggattacaggcacccgccaccacgcctggctaatttttgtttttgttttttttttttgagttggagttttgctcttgccacccaggctggagtgcaatggtgcgatcttggctcactgcaacctctgcctcctgggttcaagcaattctccggcctcagcctcccaagtagctgggattacaggtgcctaccaccttgcccagctaatttttgtattgttagtagagacagggtttcaccatgttggccaggctggtcttgaactcctgacctcaggtgatccgcctgcctcagcctcccaaagtgctgggattacaggtgtcagccactgtgcccagcctaaaagctttttttgatgcgacagtagaaacagcccagaagagaagtcagatggaaaaaagtgttcaaggatgggcatggtgactcatgcctgtaatcccagcactttgggaggccaaggcgggaagatcacgaggtcaagagatcgagatcatcctggctaacatggtgaaatcccgtctctactaaaaatacaaaaaattagccgggtgtggtggcgggtgcctatagtaccagctacttgggaggctgaggcaggagaatggcgtgaacccggaaggcggagcatgcagtgagccgagactgcaccactacactccagcctgggagacagagcaagactctgtctcaaaaaaaaaaagaaaagaaaaaagtgttcaaggagggaaggcagaagtaaagtgatgtcaaaagataagtgaacaaaaaatgacaagactagaggagcaaaagaagttctgaacaagtggaactctaagccatccctgtgtagcactatcagggacactccgcctctactgccttttaatcattgaagttggaatcactacaccctcaccagtggactcaaccacaggctgggaccaatcctattttgaatcttgtgggtcaaggaattctagccaattagcttgggcaacttggtgtaaagtcagtcctgctattggttccacttctcccttaagtcccaattcccaattcaaataattaggtcccaattcaaataatatctgttcctgcttgttctcacctacccccagaggtttgattctagcctctgaatgttggcctcacagctgaaagcctagtacttgcaatcaaaactcccctctgatgatactcattcattttgagaatcccaatctctgttccaaatacctgccccttgttgaacctccccaacttcaacgctagtagtctgaactactgtctattttttattcattctagacaaaatactctacctggctgactggacttggtcttgtcatctgcttttcggtagatatcctaaagcaagatgactcacctgtcagtatgaccgactaatcttccagctgtaggtgttcctgatctggcctatctgtcactaaccactaccagttctagaaaacatgctaaataagaaatacgttccagagaaagatacagaggaatcagaggatttgacagataaaagagttctattattgcgtcagaaggaagtgatgcatgttggtagttcaagaatcccgtttgaggtgtatgtgtagagagttcacagaaatcatatagctatatgaagggtgtatggtatctcttaagggcattcaatacatgatagagcctatgaagactcaggcctaggaactcgggcttccacttttgttgatttctcagaaaatgaatggattgattctcaaggagacttctaaaaaatatactaagtagaagaatctggcagatggtcttcccatctactcttccatgaaacgcttgatttctttttttttttttttagagacagggtctcactctgacacccaagctggagtggagtggacttgccctctgaaacaagaaaaccttaaactcagttctgagagagaaagtaaacaagctgccaagccagatgctctggaagatgactatctgacacagaaagcagacactcaggctgtgcagtaatgctcaggttaaaaaaaaaaaaggaggggaaaaaggcagactcatcaagtacagtccttagggatttggatagctatataccaaagtgaggtgtatgggtaacatttgaaatgttattataaggaaacagacaagcacagttcctcagactaggcacagatcaaataccagactaacaaaaagagatacctttgcagaccaagagttagtatatcattaaggaattccagattgaaatatacaatgaaagggtatgtatgaggtaataaataaagacagggaagaaagtaacggtacagacagagtatacacacatcaaacccatatagatacctatgaaccagagtgtgaaagtacagggaagagcacttgaattaggagaaaaggtcacaataattgaagtacagacacctatagtatacacaaccgcagacagttgagaaaaactagtacaaatattgtagcattttagaccatctgccgaaaatctaattataccaaaaaataaggtttccttttttcgagacagggtcttgtacagtggtgtgatcataccttactgcagccttgaactcctgagctcaagtgatcctcctgcctcagtctctcaagtagctgggactacaggcatataccaccatacccagccaatttttttttttttttttttggtagaaatgaggtctcaccacgttgcccaggctggtctcaaactcctgagctcaaacaatcctcccaccttggcctcccagagtgctaggattacaggcatgagctaccatgcccagcccagttttttttttttttttaatgtggctagagtgtgggggaagaaaaggctgccaatatggtaatgatgtgatccttagaaatgagagaacaggccaggcacagtggctcaagcctgtaatcccaacactttgggaggccaaggcgagtgggtcacttaagcccttgagttcaaggcaagcctgggcaatacagtgagatcctgtctctatttaaagaaaaagaaagaaattaaaaaatgaaacatgagaaaacacaaccttttcatactaaaacttacaacagcaagaaaaggaaacagcgggctagaatgaatgctgttgacttcaagtacatttaaaaatgtttggagcgaatgcagctgtcgaagctggatggaactcatctggaaacaaaaggtctcctgactacagacatgaaaaggcaatatggttcccaaagaataaactctcctgagatttttacaaatgatgcctaacacagaatagggaaaagatgtccaaagaatgagaagaggcttcataggtaattgtgattaattcaaacaattagtggaaagggcacagacctggcaataagaaactgagattctggcagatactctgaatcactttctttgaaatcttgccaaaatcacagatctaagttaggcacaagccatttagcctctctaaacttcagtttcattaatttttaatttttcttttttttttttgagacggagtcttgctctgtcgcccaggctggagtgcagtggtatgatctcggctccctggaacctccacctcctgagttcaagcgattctcctgcctcggcttccatagtagctaggattacatcacactcggcttttttttttttttttttttttaagatggcgtctcactctgttgcccaggctggagtgcagtggcgcgatcttggctcaccacaacctccgcctcctggattcaagcgattctcctgcctcagcctcctgagtagctgggactacaggcacacgccaccatgcctggctaatttttgtatttttagtagagacagggtttcactatgttggccaggctggtctcaaactcccgaccttgtgatccgcccacctcggcctcccaaagtgctgggattagaggcatgagccactgcacccagtcttttgtatttttaatagagacggggtttcgccatgttggccaggctggtctccaactcctgacctcaggtgatccacccaccttggcctcctaaagtgctgggactacaggcgtgagccaccacacccggcctcaataatttttaaatagggattcaaattagatgaaccctctccttccactagtaaaattctacactatcatgatatcaaattagagttttaaaggatacacacaaaagacagaaagttgaaaaaaaaatctattgatgagattcaaaaatcatacttaaatagtgataggaaagctaaagtgctaaaggaattgaggctcatgaaaaatgctaaaaaccattttttaagtgttttttttttttgagacagggttgctctatcccccaggctggagtgcagtggcatgatcttggctcactgcaacctccgccccctgggttcaagcgatttccatgcctcagccttctgagtagctgggattacaggtgcctgccaccatgcccggctaatttttgtatttttagtagagatggggtttcaccatgttggtcaggctggtcttgaacacccaacctcaggtgatccacctgcctcagcctctcaaagtgctgggattacaggcgtgagccaccacgcctggcctaaagtgtttcttaaagtaagaaaaaagtcaagaaagattaggcttaaagtttagaaaattcagtcaacttttactgagttcttaccaggtcaaattctgggaaagacaaaatatagttcctatttggaaaaactcataatttaataggacacatgacctatagcaaaatgtaatcagttaatctcatgttaacagatggcaggactactcctctcttatttacctggtctttgaaataaacatggctctttaaactgtaaaggtggaccaaacacagaaaaaaggagttgaagataggtgaatgagccaagtatgaaaccacctctctagccaggtgtggtggctcatgcctgtaatctcaacaatttgggaggctgaggccggtggatcacttgaggtcaggagttcaagaccagcctggccaatatggtgaaaccctatctctactaaaaatacaaaaattagccaggtgtggtagtgggcacctgtaatgccagccactcgggaggctgaggcaggagaatcctttgaacccaggaggccgaggctgcagtgagccgagattgtgccattgcactccagcctgggcaacagagcaagactctgtctcaaaaaatataaaaataaaaaaggagaaatcacatctccaaacacagataagtcacaatttctaatgcttaggcaactaccaaatcctaacagaatcattgtccatcatcttttagaaatgctggagaacacgagatgaggcagaaaactggagatggagatgggcaaatgctgtaactttcaaaaagaaaaaaggagtgaagcctgaacaccataagccagtaaattaggaattgatccctgacaaaattctacagttaactgtcagactgtcagacatttagacaagaaaaccgtcgttatcactaggactttcatggactaattaagaataacttctcccaaataaatggaattatttatgactaaaggaaggcacatgacaaagactctatagctgtctttgtagatttaatatggtaaaacaggcaccaaatgataggatcaggggaggtgggtgacaatgatcattgagtaataataggtaaacacctttgaacaggtaatcaagtctcaaaattcaaaataattgtctaacaattaggactggcaaaaatgaaactggctaccttggtatttaatgagttccccatccttggaagaagttaaactgaagctggtaactacttagctgggatactgcagaacagatacacagtaccatactacaccatttaatataagggacttgagcaccttggattttgatatccatgggggtcttggaaccaatcccctgcggatatggagggccaagtgtatacctaacaggagttggattaaatggcctctaaggttcctttcattcttaagagtttcctgtttatttccctacctggttgcaatgttaaacttgtctcagcgggtattaaagaaggtaatcttacccttgagccaccctagtctggtctggcagctggcaatattatcccaggctgttttgcaccatgtatcactgacctactacagttacaactgttaacagtcacagagaccaatcctgtagaggaaaagtgctttctctttaaatgtgagagtaaaaagaggtatttaattgcataagatatcaaatttagaaatatgcaatttcaaaagtaaaacatatgctccagcaaatgcactcctacgaagtgttgctgggtcaattactggctctagagcagcaagaattataatttaaatcatggttttttcttacaaaaatgaaaaagcacatccttattatatggtataactttaatatagcattaccttgtgtttgtacaacactttttgactttgctaaatcattttacatcatacagataaagcactatccccactttgcagatgagcagggttcaaggaaattaaatgacagccagtattcatgacattatataaagttaacttttcacaagtccccctttcaggactgtcaactctgaggtttcacgtaagtgattcaataaacattgaaagaaaaaaatgatgtatccaagatctcatgactagtagtaggtgacaaaaccacacaaaattagtaactggaaggaatcttaaagattgtctagtgaggccgggtatgggggctcacacctataatcccagcactttgagaggacggggtgggtggatcacttgaggtcaggagtttgagaccagcctggccaacatggtgaaatcttgtctctactaaaaaaaaatacaggccgggcatggtggctcacacctgtaatcccagcactttgggaggccgaggcaggtggatcacctgaggtcaggagttcgagaccagcttggccaacatagcaaaaccccatctctactaaaaatacaaaaagttagctgggcgtggtggcaggcacctgtaatcccagctactcgggaggctgaggcaggagaattgtctgaacccgggaggcggaggtgcagtgagccaagatcgtgccattgcactccagcctaggcaacaagagcgaaactccatctcaaagaacaaaaaacaaaaattagtcaggcatggtggcgggtgcatgttatcccagctactgggaggctgaggcaagaaaattgcttgaacctggaaaacagattgtctaacaagttctattagtaaatctatagctctttctcctcatgttggtaagaggttttatttgtagaaggtatatgataaaattcaaccggatttaggctgatttttcccccctggaaatataggtacactgaggaaaatacaaatatttaaactgttttacttgcctaaatgaggcaagtaaattaaaaccagtgtggcaagtaaagtaaaaattagtgtgtgttctgggtatttttcttcaatgtattttaatgatgtaagtaaatgcatgtatcacttaagagcggtttttaatattgatgaagtccattttattggtggtttttcttttttttttgagatggagttttgctcttttgcccagggtggagtcaagtggcatgatcttggctcactgcaacctccggcccccaggttcaagcgattctcctgcctcagcctcccaagtagctggaattaccgtagagatgaggttttgccatgttggccaggctggtcttgaactcctgacctcaggtgatccacccactttggtctcccaaagtgctaggattataggcatgagccaccgcacccagccttctttaagacagggtctcaccctgttgcccaggctggagtgcagtggtatgatcatggctcactgcaacctccacctcctgggctcaagtgatccttctgcctcagcctcctgagtagctgggactacaggcacgtaccaccacaccctgctaatttgcatacttttttagagatggggtttcatcatgttgcccaggctggtctcgaactcctgagctcaagcaatcctccctctatgcctcccaaagtgctggcattatgggtgtgaaccactgtgcacggtcaatgtgttttcgttagtggttactgcttttcatgttctatctgagaaatctttgcctatcgcaaggttttgaagatatttttctattttttctggaagttttatagatttagtgtttatatttaggtctatgatctatctcaaattttataaatagtatgaggcaaaggtcaagtttcatcatttttcatatagatacgcagctagtagaacagcaccatttgttgaaaagattttccattctcaattatgttgatgctcttctcaaaaataaaatcaactgactggccgggtgcagtggctcatgcctgtaatcccagcactttgggaggccgagaacggtggatcacctgaggtcatgagttcgagaccagcctgaccaacatggagaaaccccgtctctattaaaaatacaaaattagccagacatggtggtgcgtgcctgtaatcccagctactcgggaggctgaggcaagagaatcgcttaaactcgggagatggaggtttcagtgagctgagatcgcaccatggcattccagcctgggcaacaagagtgaaactccatctcaaaaaaaaaaaaaccccaactgactgatagatgaatgcataaagaaaatatggtatatacatataatggaacactatttagccttaaaaagaaagggaatcctgtcatatgctacaacatggatgaaccttgaagacattatagtaagtgaaatgaaccaggcacagaaaggtatgttgtatgattctacttacattaggtatcgaaagtagttaaacccatagaaacagaatgtagaatagtgattatcagaaggcagagagaaaagggaagttgttttttaatcacaacaaaaaaatcaactgaccatgtatgtgtggaactatatctggactctgttctcttccaatgatttctttgtctatccatatgatgtcaatactaccgtgtcttaattactgaagctttatactaatgtcctcaaatctagtggtttaattcctcccacatttggtgatttttttttttttccggagtgttctgacttatctaggtcctttgtatgtccatataaattttggaaccaatttctgaaaaaaggaaaaacagcctggccaacatggtgaaaccccatctctactgaaaacacaaaaattagctgggcgtggtggcatacacctgtaatcccagctacttgggaggctgaggcaagagaaccgcttgaacctgggaggcagaggttgcagtgagctgagatcgcaccactgcactccagcctgggcgacagagtgagatcctgtctcagaaaaaaaaaaaagaaaaagaaaaaaagaaaaaaaaggccaggtgcagtggcacatgcctgtaatcccagcactttgggaggctgaggtgggaggatcatttgagctcaggagttcgagactaatctgggcaacatagtgagactctctctctacaaaaaaattaaaaaattagctgggcattggtggcacatgcctgtaatcccacctacttgggaggctgaggcatgagaattgcttaaacccaggaggaggaggttgcagtgagccaagatgacactagtgcactccagcccgggcaacagagcaagactctgtcattaaaaaaaaaaaaaaaaaaaaaaaaaaaaagccggtgcattggctcacgcctgtaatcccagcactttgggaagccaaggtaggcagatcacaaagtcaagagatcgagaccatcctggccaacatggtgaaaccctgtctctactaaaaatacaaaaattagctgggcatggtggcgcgtgcctgtggttacagctactggggaggctgaggcaggagaatagcttgatcctgggatgtggaggttgcagtgagccgagattgcgccactgcactccagcctggtgacacagcgagactccgtctaaaaaaaaaaagaaaaaagaaaaaaggccgggaacggtgactcacgcctgtaatcccagcactttgggaggctgaggtgggcggatcacctgaggtcaggagttcgagaccagcctggtcaacatggtgaaaccccatctctactaaaaataaaaaaattagccaggtgtggtggcgggtgcctgtaatcccagctactcaggaggctgaggtaagagaattgcttgaacctgggaggcggaggttgcagtaagccgagattgcaccattgcacttccagcctgggtgacaagaatgaaactccatctaaaaaaaaataataataaacaaacaggtatagtggcttgcacccataatcccagctactcaggaagctgacgcaggagatcacttaagcccaagaggtcaaggctgcagtgagctatgatcccgccactacagtccagcctgggtgacaatgcaagaccctgtctctaaataaatgaataaaaagaaaaagaaaaacagcctaccaggattttggttatgattacattgagtctatgaatcagattggagagaactaacatattaataatatcaagtctcctaatgtatgactatagtatgcttctccatttatttaggtcttctttcatttttctcggctaatatttgctctcttctactgtttttagttttttatgtagaagtcttgcttatctttggttaaactcattcctagtaatattatgcttttgttgctattataaatacttcttttaattttctatttttttgttgctatatatagatatgcagttgatttttgtatgttgaccttgcaacctgtgactgtgctgaattcagttattggttccagatttttgaaggggaaagtagattccttaggattttctacatatgcaattatgtgtatcagtgcatatatcactttaaaccatttaaattatgtgaactatatctcgccatcccccactaaactacgtcaggcatgaataacttaacatattacgttatacaaatatttaatctacaactttctctgttgttcactgaatggaaaaggaaagatttcttcgtttttcaattcctcagtaaattatctagagttgaaaaagagcatttgctgttaaaggcagaatgatcaactcagcaatctctaatgaattcacagctgtcagtaactttgtctagtttttcagtaagattttctgtatcataatcaattcttgagtaattaaggattaggcaataaatggggacttaaaatattggcaagaaactgcgtaggaaacattgtaacctactgggtacctcaaaccagaaatttaatttctaaataatttcacatgttattttcattgaaaaagacttctaaattttgacccttaatatattttttaaacctcaaaaccatggtatcttattccaatttaaaaattctaggctcagtaagaaaaaagaaaagaaaattctagactgggcacagtggctcacgacggctgtaatcccagcactttgtggggctaagccggactgcttgaggccaggagtttgagatccacctgggcaacacagtgagaccctatctctataaaaaattgttcttgaagctagataattatctgtactcatccaaacactgtatcataatataaaaaaatcattaaaactttttaaatacagatagggtgtcactatgctgctcaggctggtcttaaactcctagtctcaagtgatcctcctctgccttggcttcccaaaaaatagaatatttagctgaatcctagcatgaggtcaggtaaaatctggctaatagtatttcctagaagaaagtcacccgagtccaccaaccacctaggagtgacaatagataggccaagcccacctgaacattagaagacattaattattgttctcaacctaaacagtatagtgcaagtcatatatatgcaattatcgctaatgaagctttgataatatgtctggaaaagttcaaacaatggtaactaggaaaagattctgataggatagttctgtcaaaaagacttttttttttttttttgagacggagtttcactcttgttgcctaggctggagtgcaatgccatgatctcggctcacagcaacctccacctcctgggttcaagcgattctcctgttgcagcctcccgagtagctgggattacagatgcatgccaccatgcctggctaattttgtatttttattagagacggggtttctccatgttggtcaggctggtctcgaactcccgacctcagctgatccgcccgccctggcctcccaaagtgctgggattacaggcaggagccaccgcgcccagcccaaaaagatttttttttttttacaaaaagttctatcacattgttgatcttattcataaaacaactgttccaaaaaacttactcaataaccaaattgccagtagaatttcaaaaatacttccctaacagaggagaaaaattaaaaatgtaaaacatgtcattcaattatattccctctatcatttgactttagaaaacatagatgaaattcagttttatgggaggaatatcatgtggtggctcacaagcactttaaggactactttcctctagcaagaatacctctgctactataagagtttggacttttgatttccaggttaaccactggtcaatcaggaggattctgagattgtaatctttactgtggcttaagaaaaagagggtgccttcatttgcttatatgagtcagataggtgggctgatactttgggcgtttgagttagaataaagccaggttaagacaggttattattctattttatttatgataataaaattatatttgtttttaaaaatgtcctcatcttttagagatattgcctcaaaataatttagggtggaagggggatgactgaagagggatgggtatagattaaaaaagactggccatgtatcaatggttgaagcttggtgttgcttcattatactattctctacttttgtaatgcttgataaaatgtttaaaagcattttattcacaatttcaaattttttcagattctaatcattattgaaaatttagtgtataatagtaaaatctgtatggtgactcaccggacattttctggtctgagtttatcgagaaccatctctattaagtcaggtctaaattcttccagtaaatattccgctgtgagcacctcttctaggggataatacttttaaaaaggaaaatataaataaataaaatatacaaagctactacatagtttattaaagcagatctgtaacacattaaattcattactgtacaccctttctctcttcagttaaattttactccattggaaaaattttctgtagccctaaatcgttgtctctttcctaccacattgttaagcagtttcatattgtttgatgattctgccaaatatactgttaatccccaaacatacttccattgtagagagcaaaatcacatttctttcggggaaaaccacgaatgtttctggttaaaaactgagtacttgttaatgaagaaaattcgatattaaaatgctgacacctacaggatttttaaaatataaagtacacacatttttatgaacagaatttcctcctaaatttctatgaaacaaattagacaaacatttaggaagcggctgtggaaaaaaaaatggcttatatttttggccagtgtagaaaaacaatgcagaagatgctttttggtaagagcaacttccaatatactgagacacactgactgattcattcatctaataaatatttaatgaacatctactatgtgccagacactgttccacacactatggatacaaaagtaggtaagacacatgaaatcctttgtcctccaagaagcacacagacattgtaattgggagggaggcagacaacaaacaaatattgtaatgttagtgagagatgctatgaaaacaataaaaaaaggggcaggggcattattttagattgggaggtcagagaaggtctgaggagaagaactctgagtggagactgaaatgataagaacctagccaggcaaagatcagatagaacagtgtttcatgtagagaaaatagcaatgggggaggaataaacttaatgcttgaaaattagagagccagtacagttggagtggaatgcaaatgggagaggtgggctggacagtggtatagaagatggccagataggctggggccacatcaccttgtaggccaaggaaaattttgcattttatgccaactctgttgggaaaccactgaaggaatttaaacagaggagtgaaacattcagattttagttttcaaaagatcacgagcctggaaaaataaactacaatggggaccaagaggaaaatagggatcgcaggtaaaagactatcatggtagcccaagcaagaaatgatgatagctcagactaggatggtagcaatggaaattttaaaaaagtaaatgatcaatagctttcatataagtaacacctgatatgctgtagaactgaaatatatttaaagccaataagcaaaatgcatatttaataaaaatattacataaaataaatttcacgatgatgaaaattaagattttaaacatctcctgacatcaacatttgccctgttgctacaaagttgaaagctttatacctcagcttcaattgtaatcattcacttattactgaaaatatatgcaagattgctgaaatactccacacagcaatgtatacagtaaaataacaacaaacttacatgcaatattcctgcaatcttagatgtatagccccgtggcctctctttgtctttaaacctaaaagcaacagcattcaagtcctaaaatagaaagttaatccaattagatacggccacccttatttagaaacctttttttttttttttaagtgtttggcttgcactataagctttctactccatatttaactttatcacactttctgaaaaaatggctatgcttgatttagaaatgtatagaatattttaaaaatttcttaatgtgtataaaatttaatccatcaatctaggcttaaaaccaaaagcaaaataggtaaacaactttcaatgaaaataacaaatacaggatatggctcgatagcctaagttgttgaaactaatagccaaagaatttagaaaaactgtgtgaaagaaccttgtgagatccaacaattccaccatagatgattttggtgactcattcagagaacagcacccagattaggagttattgtcataattttcagaagcagagattatacctttaaacttttatctagttaaaaaggatgtttctcatactaaaatacatttgagaatctcgataggctttaaagcacgtatttttaaaaacccttttttaaaaggcttttaaaaatttgaaagacaaacaccatttgttttacgcaaaaaaaaaagccagcctcttcccatacatacaataataaaatcacttttaataacacaatcatacataaagcaattcattacttctttgagagtttgctacagatttaaagatctgaaaacgacagagctcatgcagcttcaggcagggagtaacataatccctgacatattccagctcaagaaactgctgattttcttctgagtgatggaaaagcatttgatttcttcccttttccatcctaaaaagggctacacgatgcctttccccttagttgtgccccaagtagcaaatcagactagtacaactaagccttaactaatactattatacattgcaaaattttagacttcagttaggaaaaaaactttaaaagtttaactgggccttaaatttaaattaattcacatgtatttgctcttgaaaaacagattccttaagaaaaattttggtgaaacaaaagtaccttgcactcttggaaaacccattcttgaggtccttctgcacgtaacttctgaatgtattgaaacatgtgcaaaattatatcttcaacatgtactggaaaaaaggggcacacttaaaaaccattcagtccttgaatccttcaaagcagtgagctcactcctaaggtaaagtcagataagtggaagatggtccctcttagaaaatgcagtcctcacctccctgagactggctttacgtgtcccacatacatggccctctgggctcagagatatgtgacagaaagggtgttggggcagtaaatgagcaaataaaaagccaagtccacatttaacaagtgcaacataatgatcagttgttaaggggggaagaatcatccatgaaacaaaggccaagttacatatgaaaaatacaatggataagttgtatgaattaaagtgttgtagctttcaacataaaacagatccacagcatgaagaagttaaaaaacatcatagaaagtaaattttcattcaaaagtaaaaaggtgaatcaatacttacataatccttcctcggtcaagtccacattaatgataaaaaacataaaacctcgggctccttccttctgcccaccaacaagagtattaacccagcctgcaacattcaaaggaaatcaatacgattgattgcatatgtggcttccttgaagataagaaaaattttaaaaattcatactgtatgttcctaagatatcagaatgaacctcttgcgaaaagattgggaaaaaaaaatcagttcagaaaagcagtttaagatggtgcagaagtgggggctttcctgaagattcctcaaatcaattcccagtcaagagtagactactggctgggcgcggtggctcatgcctctaatcccagcactttaggaggccaagatgggcggatcgcttgagaccaggagtttgagactagcctaggcaaaatggcgaaaccccatctctatctaaaaaagaaaaaaaaaaaaaaaaggcaacagcgtgccaacaaccaccatctcactcactaacccaaaatggtcacatctaacaatgttccttcataggacactattcaggagaaaatgagagccagagtgaaaagatgtggtggacactcagaagatgctgcccaggagacttaccctttgacttaagttctgataacagacttccaggaccttcatgcccaatgagatgaccaagataatgaccaggatttgatttgtagtatttctgaaggtcaggtatgggaaatgtcacatagagattcctaatatctttaatgggtactattttgtaaagttgctggagaaaacaaatcacagagattagctatatacgactcctactgaagaaaatatttctaaactatgaagaatgattttcatgggagaatcccaaatttaagagcaaatcaattgccacagaaaatgatacactgaccacaaagaaataaatgactcagcactctcctagtggaatttcattacagtcggtatatagtccatgtttgaccccctgaaccatgcagctaaatattaatggttttgaatgcttatcttcaggtacaggttaacagcttcaacagtctattaagactacagctaccaaaactacttttagcatgtaaagaccagaacatattgatatgtttttggtgattcatgatcctaataaatgtgagattgattttattatcccgacaaatatttaaaaccacatgggggccgggtgcggtggctcacacctataatcctcgcactttgggaggctgagggagacagatcacctgaggtcaggagttcgacctcagcctggccaacatggtgaaaccccatttctattaaaaatacaaaaattagccaggcacagtggcatgcacctatagttccagctactcaggaggctgaggcagaagaattgcttgaacctgggaagcagaggttgcagggagccacgatcgcgccgctgcactccagcctgggcaacagagtgagactccatgtcaaaaaaaccaaaaacagaaacaaacaaacaaaaaacactacataggggctgggtgcagtggctcacgcctgtaatcccagcattttgggaggctgagacaggtgggccacttgagatcaggagttcgagatcagtcaaggcaacatggtgaaaccctgtgtctactaaaaatacaaaaattagccaggtgtggtagtgtgtacttgtagtcccaactactcagaaggctgaggtgggaggatcaattcagccagggaagttgaggcttcagtgagccatgatcgcaccactgcattccagcctgggtgacaatgcaagactctgtttccaaaaaaaaaaaaaaaaaacacaacataaataatgaaacctccaaaaattttcacctgttctatggtaaactaggtatatattatgtccataaattaagaagacaaaataccaaaatttatgcacttactttaagatgttcttcttggaaagggtgttcaggaaattctggcaatggaacatttttgttctctacttcagaaaataactttaccaccagattagtcaagtcatctaaagattctacaagaaaacagacaaggaaaacagaacttaagcgaatcataacatccaacagggagtgcttaaaatcttaggatctcctgaaaagtctcagtactactgaaaggaaaatgtgaaaatgattacacctcacacctatctgtttctactttaaaaaattattcacaaatattattcaaaatattatttcacaagtattataataaaattaaaacaaatattagaaacaataataattgcatttggaaaaatgactatgattcccaacaggcatatatactgaactactagcagatagagtataatgttcaccttatacatagacagagaattgccttctatggtataaaattatcttttgtgcctttaaatgtatttgcattttatttataaaagacgcctatttttactttagttttttgacacgtatgaaggactccaaaatgcacattttatatgtgtgtgtgtatatatatatcacatatatgatatatatcacatacatctcacatatatgatatatatcacatacatctcacatatatgatatatatcacatacatctcacatgtatgaaatatagcacatacatctcacatatatgatatatagcacatacatctcacatgatatatagcacatacatatcacatatatgatatatagcacatacatatcacacatatgatatatatcacatatatatcacatacatgatatatcacatatatcatatatatgatattagcaaaattctacttttggaagtataacaagaaatgagttagatctttgagaagagggcacagcagtcataggatggaataaagaacagcttgctttttattttatacctttctgtgtggaattaaattttttccatttgtacaaattactattatcctaaaaagaaagcagtgttaaaaaaaaaaaaaaaaactttttttttttttttttgaagcaaggtattgctctgttgcacaggctggagtgcagtggcacaatcccagctaactgcaacctctgcctcccaggttcaagtgattctcatgtctcagcctccccagtagctgggattacaggcgtgtgccaccacaccctgttagttttttgtatttttaatagagacagggtttcaccatgttgcccaggctggtctcaaactcctgagctcaagtgatctgcctacctcagcctcccaaagtgctggaattacagatgtgagccaccatgcctggccaaaacctgtctttttataaacaagataacctctcatcttgattctgtctcctcaaaaataggttatttataaatggtataaacattcataacctgttactgtcagtaagcatttgaatcaaataagattcttgccttgatattctatgacccatttggaacttttccatgaattctcgagagtactaaatgactatttgagagctgcctttatatggtgtaaaattctcttttgtgcctttaagtgtaggcatttgcattttatttataaaatatacctacttttgcctcaatttttttgacatgtatgaaggactccaaaatgtccagagccaaataaaaggcagatcagtggctgcctattatatgacaagtgaatttaggaatggagaaggaatattgtagcaagagatgtcagagacatctttttgcagatgggacatatgacttgaaacaaggtgagcagtcaataaaggtttgtgggcctgcagtactggtgacagcaacaccctgagcaaggttctaccaggtgtatctttcctcttgcgtatttctaccctaaaagcataaattcacagtgtcactttttaaaggtaagggagctaaacactattgcacagtctgtctaccccactaaactgtgagctccccagacatcagggaactgagtcccactcaccttcatatcatcaaggtttggcaacctcagtgtctgtacttgatgattacctatgtggcaagtgttcagataattagtgcttccacaactagggagacagctccaggcaagaacagaaaaactttttgttcccttgtgacagagatccttccacatggttactcttcctctctcctcccgtcaaaagaaggagtggattatcttttaatcctccaagagatccagtttcctcctcatacctctatactgtaaagacatctctctctggttcagcacaggaagtcagtcacaatgggagagtgatgtgtatggatcagagaattgagacactttattttttagattcttattctgtcatttccactaaaccaagaacattctgaggacagggatcaggtttgattcatctattgccattgttacttgcctattaaatgtttactgaaatcatgtgtttaatctcaaatacaacatagattaaaaaaaaaaaaaaacacccagctttggcacctaatcccaggactgggttctaaacagcaagtgatattttaacattctaaacccacctacctgaagcaagcacatagcattacagagtatgctttttttttactgtcctcactccctgaatccattttacaccctggttcttgctaccaacttaaaaaatagtttattttctaactataaaagtaacatttgccaatagcagaaaacttagaaacaaaagctaaattatggtaacaaaagttaccataatttcatgattataaaggtgctagagtggctactactgtttatggagcatttgctatgtgccatgcaccttgctaaacactttgtattatctcaattaaacctcacaacaggtacaatgtaccacccaccactttacaaatgtgaaaactgaagtttgaaaaacctaagtaagtttgttagctcatagccacacagctaagtaagtggtatatttggaatgaaaagccaggttgttggactgtagaatgtgagttcttaattactatacaacattattaaatttctagtacatgcttttccattttgtcttttacctacaccatatatggtatattagagtttttggtgttttttgttgtcgtttgttttttgagatggagtctcactctgttgcccaggctggagtgcagtggcacaatcttggctcactgcagcctccaccccccaggttcaagtgattctcctgcctcagcctcccaactagctgggattacaggtgcccgccaccatgcccggttaatttttatatttttagtagagatggggtttcgccatgttggctgggctggtctcaaactcctgaccacaagtgatccacctgcctcggccttccgaagtgctggaattacaggtgtgagccactgtgcctggaccctattagagtttttaaaaattttgtgggggggatatgtcttggaatttttaataaatcccaaaatgggaccatatagcacatgtttttgtaaacagcttttgttttctctttaatatattaagaacattttaaaaattatattcttatatataatatacatatattaattaaaaatgtttagttatatatgcacatataagaacatatattcatatatatgagaatatattaagaatatcttcccatggtattaaaatgctgtcataaaactgtttattcattcaatatatatttacctatgatgtgccaagcacgagcccaggtactgaggataaagcagtgaacaaaacaaagtttctattctcaagtaatttacactttggtagggtggacaacaaaaacacacaaatatttaatacctgaggtattaatactataaagaaaaagcaggtaagatggaaagtagaataggaaatgttatttttctataagatattctatttgcaattataaaatcagtatttagccaatctcctattaacatttagatttctaaattttcgctaatatgtactatactgacagaaacatccttttatatctcctatttgaactctgattatttcctgagattgcatttttaaaagtaaaaatgcatctttacttttaagactgatactgttaaactgccctccagaaagactagagcaattgataccatcattaccaatataaaaaagcaacaccatcggcagtgggtattacttcaaaacaaaactgtgataatttaacagcaggaaacaatgttagtagttaatctgcattttaaaaatcaaaccattgtttacattccaaatggtttcccaagtttatcatcatctgctttttttttttccagttttttgaattgttataaggtcaaatctgccaatctttgtcctttttgtgtgtttttttttaatatgagatctctctctgccacccaggctggagtgcagtggtgtggtgatcacagcctttaactgcagcctttaactcctgggctcaagcgatcttcagcctccctagcagctaggactacaggtgcagactaccacatcccactaatttaaaaaaattttttttggtagagacaggatcttactatgttgcccaggctgggcttgccttgcttttatatgcttagagcacctattactgtagtaatttgtattttttttcagatctccacttaaacttcttttgggaacacaatgatttaaacataaaaatccccacctatgtattctctaacaagtagatcattttcaaaagatgctgagcaaataagcagctctatcttatatccatcttctaacactgtgaaaaagccaacattaaaaacttatattatccaattctataaaaaattgtaagggttcttacctcgacctaaaacacaaacagccattaagttggatgaatagtaagcagaatggaatttcagtagctcttgtcttacatcaatgccttcttggtttggtctagtctccagagtatatttgttacctggaagggaagaaaagggatttcttagaaaaagcaaaatatgtggacttttaaagttttgtaattatcactgatattgcttaagatgaactttaaaaataaagttctaatacacagaataactcaaatttatttgaatgttaagtgaataaacaggataatagagtacaaaccagcaacattttaaactatagtcgtctctacggaattaaaagtgtcttttttttttttttttgagacggagtcttgctctgttgcccaggctggagtgcggtggtgtgatctcggctcactgcaagctccgcctcccgggttcacgccattctcctgcctcagcctcccaagtagctgggactacaggcgcccaccacgacacctggctaattttttgtatttttagtagagatggggtttcactgtgttagccaggctggtctcgatctcctgacctcgtgatccgcccgcctcagcctcccaaagtgctgggattacaggcatgagcaaccgcgcacccggccttttttttttttttttttgagacggaatttcgcttttattgctcaggctggagtgcaatggcgtgatctcggctcaccccaacctccgcctcccgggttcaagtgattctcctgcctctgcctctctagtagctggattacaggcatgcgccaccacgcccggctaattttgtatttttagtagagatggggtttctccatgttggtcaggctggtcttgaactcccgacctcaggtgatctgcctgcctcggcctcccaaaatgctgggattacaggcctgagccaccaagcccggcctaaaagtgtcttataaaaattatacttttggccgggtgcatggctcacgcctataatccaagcactttgggaggccgaggcaggcagatcacctgaggtcaggagttcaagaccagcctgacaaacatggagaaacaccgtctctactaaaaatacaaaattagccaggcgtggtggcacatgcctgtaatcccagctacttgggaggttgaggcaggagaatcacttgaacccaggaggcagaagttgcggtgagccgaaatcacgccgagtcaagattgtgccattgcactctagcctgggcaacaagacggaaactccgtctcaaaaaaaaaaaaaaattatacttcttggctgggctcagtggctcacatctgtaatcccagcactttgggaggccaagatgggtggatcacctgaggtgaggagttcaagaccagcctggccaacgtggtgaaaacccctctctattaaaaatacaaaaattagccaggcatggtggtgggcacctgtagtctcggctactcgggaggctgagggatgagaatcacttgaacccaggaggcagaggttgcattgagccaagattgtaccactgcactcctgggcaacagagtgagactctgtctcaaaaaaatatgtctatatctgtatctatatctccacttcttaaaatccctatgagatagtaggtattatgagtgcttaaaagacaaaataagatccacatggcctccattcatgcttattttaattttcaattccctatgtactccataattaattgaacagagtcactgagggatttttttagaacttgccaagttacttgtggaaagaaatttactattttgggccaaaccattaaatttgtgatgtgaattctcatagatgtgatctagactggttaaaaaaaggatgcaatgctatttttataactctccagcgatgtatgtagtgtaccactaacagctctcatgaaatcttaataactaattcaagtagggtaaaatatgtaagtcaaaaacaaatagtcaaattctctaaataataccttgcaaattagggactgggagatgaaattccaatgatcggtgtctctccaaaatggcatcttgactggaaatatcctaagatcctggcataataacttttattattggttctacttacactactaagtgagatcctgtctttcttctgcagagataaaactatggtagagtatgttcttgaagtggtttaatttttttttcttgtgtttttataatatctgatataggggcactgggaaagtccctctttcatgaaattggatgtctacagaaagccaccagatggcgctctcaaactcagtctttagctcagtagtgctgcacagtactaagattcctgtcccagaatgcttaacagatccagtgaagacagaatgtgcaagaaacagcctagcaagtaaccttaaccttaactcattaaccttttcctagtcacaaagtaatcatatgcattcatactcactagaagtagcctatcacccaagtttccaggttgttcttgtttttgtttaagatagggtcttactctgttgcccaggctagactgcagtggtgtaatcacagctcactgcagcctcgatctcctgggctcaagcagtccttctacctcagcctccagagtagctgggaccacaagcatttaccatcacgtccagctatttttttaattatttttattttttttggtagaaccagggtctatgttacccaggttggttccaggttcttaattagttctctcattttctcactaatgaccagttcaagctgggcacagtggatcatgcctgtaatcccagcactttgggaggccaaggcaggtgcatcacttgaggccaggagttcaagaccagcctggcaagcatggtggcatgcctatcatcccagctactcaggaggctgaggcatgagaatcacttgaaaccaggaggcagagactgcagtgagccaagatcacaccactgcactccagcctgggtgacagagtgagactctgtctgattgattgatagataaataaaataatataaataaataaataagacctagttctgctttactgcccagagaggtcctgagacattctctattctctcactctacctgaggggtccagatgctcttaggtgcatacccatagtcctaactccttagggaaaaaaaaaggccttttgctggagaatgtttgaagttctctcgtatcaaggtgaaatttgagtattgatgaagcctttcttttctactaaatgaagattctaaaagccacagttctagagggagttttgcttaagctccttagtgctttacactgccatctcggctcactgcaacctccacctccaagattcaattgattctcctggggccagatatcttctgactgcatggccttgaacaagttactttacttctctgtggctcaatctcctcaactgacattagtggacttacagtacataatgagaaaaatacacgtaaaaaaagtataagactattacttaacaaaaatgttaaagtcttacgacaccaactgttgtttagtatgcagagaatgagaactcagacactgcctgatggagtgcatcttgaatcaaccgctacaggaaacaacctagtcaatctgaagatgtccatatcctactacatagtaattccactcctggatatatgtatccagagaagtctgtgtacaaggagacatgtacaacaattccatagtaacactgtttcattaacaggaaaatgaataaatagtggtacagtcattcaatgaatttttcaaagagcaataaaatacaaaaattatcagaggaatactcatcaatatggacaactcttacaaaacaaaatgttgaatgaaaaaatacaagcggcagagattacacacaataaaatactatttccatgaaacctaaaaacatataaaactataaacacggaaatgataatcattaaagaagatagtggttatctctcaggagcaggaaggaaaatgcaactgaagtgtacaccggatgctcaaagtgcatttgtaacgttctctttctttaagcagtgtgacagagaatgatctggcaaatgtctgtgtacctacctctttgtatgacaactacatcataaatctgtaaaaatactgaagtatttaacataatacttaataaataaacaacggaaaataaacaacaaacagtagctactgctgttacaatttgaattgtaggaaggactcttggcttctgagtgaatcattatacaaaaagatgtactccccagagaaaaaaatagaaattgtggctagaagctgagtaaatggtccagatgactgccccccaacacctaagaaaccatgtatggagaacaacgtgaataaggctgggataataaataccaattcagtctctagacacatactgtcctaattttgtgctcattcagctgggtcatttatgtcaaattaaaatgctgctacttgtactaaaatcttgaatcctacctttctggctctgttgcatccaggtgagctccagcagtgaatggaggagcagggttgctcacctactgtgacccttccactctacgcctgctaggagagaacactgccttggcatttaggaattcagggattcttgtcctgactccatcatgtgctaattaagcaaccttggaaaagtctccaaatatctccaaggggtcatttatttcatctgtaaaatagggataatatggatatatgtccaggtgctaaaagcaaggaaaggctcaatccctgactctccttcatttcctagctgtgagacacaggcaggtttcttaacctctcttacgcctcagtttacttattcataaatgggcataataagaggaccaacctcacaggattgctgtgagaattaaaatataaataatctgccaggcgcggtggctgacacctgtaatcacaacactttaggaggctgaggcaggcggatcacctgaggtcaggagcttgagaccagcctggccaacatggcaaaaccccgtcctactaaaaatacaaaaattagccaggcatggtggtggtcacctgtagtcccagctactcggggaggccgaggcaggagaatcgcttgaacctgggaggtggaggttgcagtaagccgaaatcaagccactgcactccagcctgggtgacagagcaagactccatctcataaataaataaataatccatgttaaggctcagcatagcatctatcagacaataattactgaatattaacatggggttttgtgaagcctaagaaatgtaataatggatgcgaagaggggttggtaaattgtaaaatccagtaagtgctactttatattttcattttaacaactattttaaattctgtttagaacaaataaagcttacaaactcagcactaatgtatatgaatactgattttcaagggaataaaatttattttcctggaaaattctgaagccagcaatatatttcttatactgggaaggaatgagttttaagttttagaaacgtcttagaaaccacaggtttctccaatagtatgttctcagggaaaggtcaacttgatagttataacccattataattttatatgttctctgaaaacccaagatcctgaaagttaggctaacatacctatagctagttacttggaattattataaactttttaaaaagccctttcttcttgctatagcaatcttctaaaaatcctggaagtgagagactaaagccttttgatatatgtgaattttcccacaaaatttaaaccgacaattcctctgcagctgagtaagtatatgcaagtacaagatatgagttataaaaggggactttaagtgaaaacctcttaaatgccatcagaaaacactcctacacttgattggtccagctcttgttttcagtaaatttctagttttccacagacacatatcccagtaacgagaaaaaagatagtaacaaaatccatggaaaagctaagggaacaataaatgattacatggactaaaatatatgaaatgtttttacatccatgagtctatgtgatactcaaaaaacaaattagtcaccctgaaggatgctgacgaaccaattcattattttgaaaattggtaaataaatggaatggaataaaagcatttatcctgcctttcccacagtaactgtaccactgactagccaaatagtagaaaaggagattttacagcagtactcaagttaatcaaaagagatggaataatagaattagcattagaaaaaccaaaattagggaggtgatgcactgagaatcaatatttgcaacatcataaatgaccagacattgtatgcccaatggaaaaatacatcaccacctatgaagatgtcttgtcaaaaagtcaaacacaaatttgatcaagcctctatatccaactgccaatttgtagaaatacagaagacagaggaacttgttaaactacattgttaggggtgcagtaaaaaaaaaaaaatctaggctatgagaagttcgataaaacaaacaacctgattattcaataaataaattccaagaggggagtgaggggaaggagtagaggaagagatgaaggatgaactcttaaactaaaaagagacttaaaagacatatcagactggagtggtggctcactttgggtgactcactttggggtcctagcactttgggtggtcaaggtgggagaatcgcttgaaactaggatttcaagacaagcctggacaacatagtgagatcctgtctctacaaaaattaaaataataataataataataatgaaagacatatcaaacaatcactaatatgtaatacttatttggactctgattcaaataaactttaaaaataatgatttttataagaacactagaaatttgaacactaactggatatttgataataatggtaacaataatggtatttttatgtttttaaaaatgaattgctatgttttagagatatatactgaaatatttatgagcaaaatgatatctagaatctcttcaaaataatacaaaagggtgaatggaaatgtggattgtacagaattggccaggggcagggtgatgcacacatagggtcattatagtattttgtgttcttttgtgtatgttttaaattcttcacaaaaaaaaaatggtgaagggaagaaaagaggaaataagggtgggagggaagagagaaaaaagtaattgaacttgtattagagtctgatttggtgtgttattatgtttaccacaggatcaggagtcactgaactaccctctggttcatattccacaattttattgggttctctttttctattctattccttcctacttctctatgcaaaagcatcctttgttatactcaaactatcctaactcatgttctccaaaagaaaccaggctcactccttggtcttttcttcatgtcatggttttgggggtcaacttaattactatcatgaagaacataggctttgagttcagactgacttgataattgaattccataacctatacagatagttccactaccaccctatctctctcctctctgtactccctgcaagactaaaacattagtcaaatacaacaaatattagttccttttctttttccccttgaatggctcttccttctgcttaaggaaatcttatctatacttcaggagaagtgaaactgcatctccgctaagatcctggagaaataaattctgggcaacactaaaacatgcaaaatagaatagtgtttaaaagctccaaatctgggcacagatcctgactccagcacttaaaagctgagggacccaaggcaatttaattatcttaagtcttaatctactcatgtaagatggaaatatgagcatctacctactggggttactgtgagaattattagaaattaaataatccacgtaaagtgcttagcatagcactcaataaaaattagcaagaaaaaggaggaagaaaatggagagatgatgatcctggaaaatcaaagctaaaattacactcagtgaaatcctgggtttgccttgcttccccaactaaactttcagcaccttgagtgcaatgacactagttacacttctttgcattttctaatgcactttacatgtagggggactaaaaaaattacttattaactgagagagagaaaatttgggctcatttatatttataatcctatgaacttggaataagcatactagagtaaatagcagcggagtcaggcagatgacctgagctcagaagttcgagactagcctgggcgacatggtgaaaccctgtctctactaaaaatacaaaaactagccaggtgtgatggcacctgcctttaatcccagctacttcagaggctgaggcaggagaatcgtttgaacccaggagatggaagctgtagtgagccgagatcatgcgaccgcactccagtctgaatgacagaaggaaaccctgtctcaaagaaagaaaagaaaagaaagaaattttctttcttttcacttgctgggcacagtggctcacaccataatcctagcactctgggaggccaaggcaggcaaatgacctgaggtcaggaattcgagaccagcctggccaacatggtctctacttaaaaaaaaaaaaaaaaaaattagttaggcattgtggtatgtgcctataatcccagcaacttgggtggctgagacatgataaccacttaaacctaggaggcggaggttgcagtgagccaagatcatgccatgtcacttcagcatgggcgacaagagtaagactcagtcttaaaaaaaaaaaaaaaaaaaagtcacgcacacctaaaatacagctccaccctctatattcttgtcttcaactgtgcctttcattctacctatacatgaaggagtacctgttttgttgttcccactcactctttgacctccttcttttatttccctcccagctgaataaacccagttgctcccacagtgtcggtagagttatgtttggagaaacagatcagtaaggaataaccagaactaagtttttccttttactattctaaacctgcttgtaaacattcaactgctcctactttaattccattgagaggcaaacaaaaaaacaaaatagggcagaaaaatggtttctagtttatcaggaactatgaaactaaaggcatatgtgaataatgaagagaaaaagtgaaagtggataccaactaaattcaataacatattaaaaatatcattcaattcacaaattagctgggcatggtggcaggcatgtaatcccagctacttgggaggctgaggcagaactgcttgaacccgggaagtggaggttacggtaagctgagattgtgccactgcactccagccttggtgacagagtgagactctatctcaaaaaaatatatataatatattattatatatattatattatatataatatattttatattataatatatattatatataatatattttatataatatataatatatattatattatatataatatattttatataatatattttatatattatatattttatataatatataatatatattatattataatatattttatataatatataatatatattatattataatatattttatattatatatatattttatatataataatatatatcattcaacatgatcaagtgggattcatctcagggatgcaaagatggttcaacataaacaaatcaggctgggcacagtggctcacgcctgtaatcccagcactttgagaggccgaggtgggtggatcacctgaggtcagaagtttgagatcagcctggccaatatagcaaaaccccgtctctactaaaaatacaaaaattaaccagatgtggtaatgggcgctgcaatcccagcttcttgaaaggctgaggcaggagaattgcttgaacacggaagttgcagtgagccgagatggcaccactgtactccagcctgggcgaaagagtgagactccatctcaaacaaacaaacaaacaaaaatatatacaaatatatacaaatcaataaacatgatacatcacagggtcaggtgtaatggctcatgcctgtaatcccagcactttgggaggccgaggtgggtggatcacttgagatcaggagttcaagaccagccttgccaacatggcaaaacacagtctctactaaaaatacaaaaattagccaggcgtgtgcctgtaatcccagctactggggaggctgaggcaagagaatcacttgaacccgggaggcagaggttgcagtaagccgagattgcaccattgccctccagcctgggcaacagagtgagactgtctcaaaacaaaataaaacaaaaacatgatacatcacagtaacagaatcaaggacaaacaccataagctgaaaaaggcattcaataaaattcaacatcacttcatgataaacgttctcaacacactgggtagagaaggaacatatgtcaaaacaataaaggctgtatatgacaaactcagagctaacatcatatggaacagcgaaaaagtgaaagcctttgctctaagatctgaagaagacaagcatccccacttttaccactttatacagcatagcactggaagtcctagccagagccattagacaagacataaagggcatccaaaatggaaagaagtcaaactgtcattgttcgtagacaacataatcttatatttagaaaaacctgaagactctatcaaaaacacctgttagaactgataaatgaattcagtaaagttgcaggatacaaaagtcagcatatcaaaatcagtagcatttctatatgccaacagtgaacaatctgaaaaaaaaaaaaaaaaaaccaagaaagcaatcccatttataatagctacaaaaaacaaaaaacaaacacacaacaaaaaagccctctaagaacaaactgaaccaaaaaagtaaaagatctcaggctgggcgcagtggctcacacctctaatcccagaactttgggaggccaaggtgggcagatcactcgagctcaggagtttgagaccagcctggccaacatgcgaaacttcatctccactaaaaatacaaaaatcagctgggcgttgtggtgcaagcctgtaatcccatctacttgggaggctgaggcagaattacttgaacctaggaggtggaggttgcagtgagctgagatggcgccactgcactccagcctgggagaaagagcgggactccgtctcaaaaaaaaaaaaaaagtaaagtaaaagatctctacaatgaaaactataaaatactaataagagaaattaaggagggcatacacaaaaaggaaagacatcctgtgttcatggactggaagaactaatattgttaaaatgtccatactatccaaagctatctacagattcaatgcaacccctatcaaaataccaatgatattcttcacagaaatagaaaaaaaaatcctaaaatctatatggaatcaagacaaggactttttcagaatcctactgtcctttcacagctaccaatcaggtattatactattaatatgatttatttaacattattatgggcttcatatgcacaatctcatttaatattggcatcaacctgatgtggaaaggaactggggcttagagaagttaagaggctgggcatgatggttcatgcctgtaaccctagcactttgggaagctgaggcaggaggatcacttgagcctaggagtttgagaccagcttgggcaacatagggagaccctatctctacaaaagattaaataattagctgagtgtggtagtgtgtgcgtgtagtctcagctacttgggaggctggggtaggaggatcatttgagcccaggaggaggaggttacagagtgccaagattgcaccactgcattccagcctgggcaacagggtgaggccctgtctcaaaaaaaaaaaaaaaaaaaaaaaaggacagggtctcactatgttgcctagactggtcttgaacttctgggtgcaaaccatcctcctgcctcagcctcctgagaagctgcgattacaggtgcataccaccacatctagctttttgtgtctcttttgaacaaggattttaaatttcaatgaggtcaagtttatctctaaacctatggttcatctctatcttcatgggtttttctgtgtgtttaagaacatttcctctatctgaagataaaaaaaattctcatatattttcttttaaaagttgtagcgaaccagactcagtggcacatgtctgtagtctatagaaagtctacataaagtcctaagaaagaactatatttttttcatttgtaatgtacctctgccttatatcaagtttccatatgtttgtggatgtttccagggcctataatctgttctacttgtatcttcatgcacccctgcttcaattctactactgtaacaactagaactttataataagtcttggtacctggtagaagtagctttccttgttcctcaaaattatcttagctattcttggccttttactctcttattaattttataatgagattatacaattcctaaaaaaaaacttacaggactttcaactggcactgcattgaatttagagaaatttggggcatatttacatttatgttatatagagtttaaccatccatgtgcatgatatacctccccatttaggcattcttttatatccattacatatttcttgcaactctttcattggatttatttctgaatattttacagctttgttaaatattgcaaatgaaataatttttaccccagcattttcctgtaattgattattgatacaagaacatggccgggcacggtggctaatgcctgtaatcctaacactttgagaggccaaggcgggtggatcacgaggctgggagatcgagaccatgctgactaacatggtgaaaccccatctctactaaaaatacaaaaaattagctgggcgtggtggcacgtgcctgtaatcccaactacttggggagctgagacaggggaatcgtttgaacctgggaggcggaggtggcagtgagccaaggtcacgccactgtactccaaagaacgcaattttagtgtgtttgtcttctttctggcaaccttgctgaattatttttaatgactgatctgaagattttcttcagtatttttatggaggcaatcctatcatatggaaataaggaaataggttttgttgtgcttcctttccatctcttataatcacattttcccccttgatttattgtaatgattaatacctgtaagtatagccaaacaaaagtgatagtgggcatccttattttttcaacagaaatcctttgaaacctccattaatcatgaagtttgacaatagcttttaatcagcttgaaagttttttattgttgtggtttatttttgttcatggatgagtgctgtgttttatccaatgctcagagtctactgtctatcactttggactactaaaactgtgggtcaggacccattatattgtaattaaatgcatttaaagtattagcagatcagagtttctctagaaaaaaaaaaaaacagaatataagggaaagtgccagactacatcccatgatgtaagatagtgtttgacaaaattttgtttcagctgcttacacaaacacatatatgtactctgaattgctaaataaaatgtgcttcttactatgagttgtatacaaaaaagagtttgaaagccactaatctatactatttctgagcatgaaaaccgactgttagggacaaacatcttactgtaaagttttcttaaaacagataatacaatgtgtggtttttattcattcaaaaatacacacctttttctggtattattattttaaatcaaaatcccttgatgagaccaggcgtgatggctcatgcctgtaatcccagcactttggaaggctgaggcgggcagatcacttgaggtcaggagttcgagaccagcctggctaacatggtgaaaccccatctctactaaaaatacaaaaattagctgggcatggtggtgggtgcccgtaatcccagctactcagaaggctgaggcaggagaatcgcttgaacctgagaggcagaggttgcagtgagccaagatcaccatactgcactccagcctggacgacagagcaagactgtctcaaaaaaaacaaaacaaaaaaacaaaacaaaacaaaaaatcccctgatgaacaaagtggcccacactcacaaaaacatctgaggccaaagcaatctacataaattagcatgaatttctgacaaggaacctactgcaacgatcacttttgcaaagttttcaatatgcataatatctgagataagggcatacaactgtcatcaaattttcaaatgtacctgtgaccttaaaaatacacagaacttctactccaaaaaattcaacgtaagtttataattctaaaatcagaaggtaacttgacatttgcattacttatatcacattttctgtactgtgtattgagtctggctcacttgtttctcagctgtttatattaccttgtactttgctaactgcctagcttttcaggctataaaaagaaatatgccctgaaacttcacccatatggatatgccatgcaatgtatctctttgcccatcattcctgaaacccttctatagaatattttaagattgttcttgtggccaggcatggtggctcatgcctgtaatctcagcactttgggaggcgaggcaggaagaatacttgaggccaggcgttcaagaccagcctggtcaacatagtgagaccccacctctacaggaaaaaaaaatgttccttgtttgtgaccagaagtaacactactcaccttattcactggatttatttctggaaaatgtgtaactgctttctgattatgctgattataatttgtcaccagtgaagctatttaaaaaaaggcaactcccaaagaggagctccaacatattctgcaaaatagcagcattgtttgtgtaagtatctaacataccaaaaggactactttaaataatcgccaggcgcagtggctcacgcctgtaatcccagcactttggaaggccgaggcaggcggatcacctgagatcaggattttgagaccagcctgaccaacatggagaaaccccgcctctactaaaagtacacaaattagccgggcatggtggcgggcgcctgtaatcccaggtactcaggaggctgaggcaggagaattgctggaacctaggaggcagaggttgtagcgagctgaaatcaggccactgcattccagcctgggtgataagagccagactccgtctcaataaataaataaataaataaataaataaataaccatttgaatgtaatgcttttgaaaaaacaaaaaaaaagttgttgttttttttttgagacagggtcttactatcacccaggctggagtgcagtgactcaattgtggctcactgcagttgaactcactggctcaagccatcctcagcctcccaggtagcttggactacaggcacacaccaccatgcctggctaattattttattttcttgtaaagatagtgtctcactatgttgcccaggctggtctcaaactcctgaactcaagaaatcctcccaccttggtcttctaaagtgttgcagttacaggcatgagccaccatgcctggcctgatatttgttttttaaaactcacattccattcttgacataccatgtatactgatgttctccacaaaaatcactttttaaaaaattcagcattatgtagacattctaagaaccacactattcatcttggcaattatgttaatattgagtgccaagtaccacggttctaaagaatataatatcactgcttcaaagtataatttttgaaaactcctaattctgtaaagctatgctaatttctctgactgctgttggatacattaggatgatatccaaacttaaagaaagttgtctttatggttttaaaaagttcccaaaactaatttataaaataagcatgttctcataatagagaagtgaatttttaagcataaatttctaagtacattaaataatatattatcattattcttatgtacttttataatacccaaaacagtattttaaaagtatagcaatctgttaacaatgattacctctggtgagcatgactggcaggaatagataaagaatagacagactttgtgtttctgcttttatttttactctaaatgcttttgtactgtttaaatatttaaacaagtacttttttaatgaaaaattgaagaaaaaggtacaattataaagtcaagagtctccacgtttatcttattctacttcctgttatccccatttcttatctccctctaggagattgtagcactttaagagctgggatcttgtgtgtcttctacagtgtcctatctcccacagagctaaccccatagcagacgctatgcatctggattagcagaagtagaggcaatgaggacaagtggattcaacaatactacagtgagcctttacaaaaaaaagtactttggaaggtaggctttggaataaaagaatctattatcttctccatatggaatgctggttaatatctattcacaactctaactgctctgctccttaaacgtttagaaccctatttgaacaggatgtaagtagaaatgtggaattttgaaatctatcctgaattgtaaaatatgccatgaactgtatatgccatgggttatatacataaatatatacataaatatattttatatatacataaaatataatactatgcagtggccatgggtttaaatgaggtcaaggaaagcagctgttgacaaacctgtcccaaatttactgaaggggtgtttaggattccctgtagctttttccaattgaaagagtctccaggcatcattcatcacattcttctcatgttctgaatcaactgcattcacctctctgtctttgcaactttcatcgaacaaggggcacagaaaaaactgtgcaaacctaagggtacgaaacataattaaaacttgaaagatgtcattttaaaacaatagccttttagaaagatttttggaacttattagataggaaatgtaaattttgcagaatcagaaacaaaactaccattgctactaagaaaaaaggagtataaaataagtgctatgtaacagaagaaaaatctaatgttgaacagaggtaaatgcagaggagttgatctaccccagagatgataaacagtgaaaatttaaaaaattaacaccaaaaaaggcagattatggacaatagcagtctatttaagatttttaatttggtacgtctataaaaactttgttacatgtggctaatgctccaaaaaaaaaaaaaaagagaaagaaagaaaaaggcaggtcatagtttttaggccaatcttaaatttacagttttaggtgcaatttcacttagactcaggcaccttaggacaaacaagtgacctacttttaacaggctcaatttgaatatttctttcttcttatgtagaaaaacaaacttgaattagtaggaaaaaacataatgcagtaaaaaacctgaggtatgacatagtttgactaagccatgattatgggcgtttatgaaatcataagagaaaaagtccataaaattttaataagcagtgattcaataaataacatggtatgtaactttaacataagtaaccaatatgcctttcttgaggctattccttaataataatacctaactttaagatacctacagctaataaattaactcttctatatcaggttgaatttaactcatgattcctgtagtaattcttaagaaactttacatcccattttatagaataagacttgattcagatgaagctaagagcagaggctctgaataggactactttattcagtgggcctaaggaactcttgggtccataaacatctcagttactacgcctcacagtccagctgtcacagaagccattatcattacttgttatttactttaagtgcataagaaaatatgatactatgctaagtactttacatataccacaaggggaaactctatctatctggagtctataatcaaagatgtatgaaaacagatgatttctggtcacataacatcttttacccacctcaatacttccaggctgggaaaaatgtctaatagctacataccaaagctggataggcccagataaaggatcatgttatgacacagtataataaagttttttaaatgatcctcttatacaagtggatttttagtttgagccaagtaacagacatcccccatcatacagagatctattatatgaacatctgctgcagcatttgtaaagcaagagatgaaattcagtgtatgatcccagggaactaattaatggaagtcttctgggaatacatattagcgatgattacacctcaaagctgctgcctaaagactgaaacataaaataaaataagtaggaaacagactactttggcccagcacatctcataaacccataaccttgccttgataatgttttttcaataatataataactattattaaaagtaagcaaataaagccgacagtgactaaaactgccaaatttcattatagatccaaaaagttgcagaattacaccttggcatcacagaaaactataaatattcaccaaggataaacaaataactactgcctaccataatgctttggactaccagagtgtagtccattatttgagtcaaataatgaatcaaatcactgatgcaacaaaaaaattagaaattgttagctgtataaaaaattgaccaaaaaaaaaaaaaaaaagctgaccaaggctgggcgcagtggctcatgcctgtaatcccagcactctgggaggctgaggtgggtggatcaactgaagtcaggagttcgagaccagcctgaccaacatggtgaaaccccatctctactaaaaatacaaaattagccaggcgtggtggcacatgcctgtaatcccaattactcgggaggctgaggcagaagaattgcttgaacccggaaggcgaaggttgcagtgagccaagactgcaccattgcattccagcctgggaaacaagtgcgaaactccgtctgaaaaaaaaaaaaaaattgaccaagaaattaaatcatcctaatggagcttgctccagaaaacattcaaaatatccccacggttgaccaagaaattaaatcggcctaatggagcttgctccagaaaacactttcaaaatatccccacggttgaaacagcaggtcaaaacgttctgtatctactaagcatccttgagaagcaaggaaatgaacgaggagagaatatttaaggtttagcattctggaacagaagtatgtctgaaaagagatcaatgacattatcacaggttagtcctcatcacatgctttatatgtaacaccagttagaatggaaagggctgctgaaaattctatacctcaataaaatattttgtaggcctgaaggctcatttaaaatatgacatcactcattttttctttttcagaaaacacagggaaaaacactgtttaaaataccttttgttaaattatgaagccatctctgtggaaataataattattattattaatgtgataagtacacaaagttggataattcatagggtattctgcattacctgtctagggcaccttctaggtgttcatgagaaacatcaaaatagtaattggtatgctctccactagtaaaggcatttgaacttcctgcatgctcactgagaaactggctgtattcattttctttagggtatttctttgttcccaaaaaaagcatatgttcacaaaaatgacttaagccagcaatatttggaggatccgacaatgaacctgaaagagaaaacacgtatataataaatcattgtcctatgctgaaagttagtaagtacaggtgatttgtagttcttgttagcatgacaactccaactatataatcagagaaagttaagcacaagctacctaaaatgatattatttagaaagtaaatcagtagtcagaagactggtttctagtgcctgctcttgacgctaattagttggtaacctcaggcaggttacttagtgtctctgaacattagtttccccacatgccggagaggaagaaagagctggattcacagttttaagaggtaaaattttctttttatttatttatttatttatttttgagacggagtcttgctctgtcgcccaggctggagtgcagtggcgagatcttggctcactgcaagctccgcctcctgggttcacgccattctcctgcctcagcctcctgagtagctgggactacaggcgcccaccaccgcgcccagctaattctttgtatttttattagaggcggggtttcaccgtgttagccaggatggtctcgatctcctgacctcgtgatccgccagcctcggcctcccaaagtgctgggattataggcttgagccaccacacccagcaagagctagaattttcttgtcatgatttcattgcaggagactatacagcacagtgttaacagcatgcgtttgggggttaccactctactggctgtgaaacggtaagcacaatactgtacctatcttgactcaatcgcttcaatatatacccatcttacagggctgtgtgagtacaaattagatgacatatgcaaatcaccctggtagtctaaggcattatggtaggcagtagttatttgttcaatattaccttatttcttcagttctaaaatgacactgagttaaaagtttttcaaagaggacaaaaagaaacactgtcccactaactgtacacatacataaaaagcaactcggccaggcacagtggcccacacccgtaatcccagcactttgggaggacgaggtgggtagatcatctgaggtcgggagtttgagatcagcctggcctacatggcaaaacctcgtctctaataaaaatacaaaaattagctgggcgtggtggcgggcgcctataatcccagctactagggaggctgaggtaggaaaattgcttgaaccttgaaggtgggggctgcagtgagcggagattgcgccactgcactccagcctcggcaacagagtgagactctgtctcagagaaaaaaaaaaaaagaagcaacctgattaaagcaacattaaatgtgtaagaaatgtgcccatggcagggcatggtggctctcgcctataatcccaacactttgggaggctgaggcgggtggatcacctgaggtcaggagttcgagaccagcctggccaacgtggtgaaacctcatctctactaaaaatacccaaattaactgggcatgatggtggacgcctgtaatcccagctactcaggagggtgaggcaggaagattgcttgaacctgggaggtggaggctgcagtcagccgagatcacaccactgcactccagcccggacgacaacagtgaaactccgtctcaaaaaaaaaaaaaaaaaagaaatgtgcacacaaggctgggagcagtggctcacgcctgtaatccctgcactttgggaggccgaggcgggcagatcacctgaggtcaggagttcaagaccagcctgaccaacatggagaaaccccatctctactaaaaatacagaattaggcgggcgtggtggcacgcgcctgtaatcccagctacttgggaggctgaggtaggagaattgcttgaacccgggaggtggaggttgcagtgagccgagatcacaccattgcactccagcctgggcaacaagagcaaaactcccactcagaaaaaaaaaaaaagaaaaaagaaatgtgcacacaagaacctatgaaatatggtattaggccaggcacggtggctcacgcctgtaatcccagcactttgggaggccaaggcaggcagatcacaaggtcaagagatcgagaccatcctggccaacatggtgaaaccccatctctaataaaaatacaaaaattagctgggcatggaggcccatgcctgtagtcccagctactcaggaggctgaggcaggtgaattgcttgaacccaggaggcagaggttgcagtgagccgagattgcgccactgcactccagcctggcgacagagtaaactctgtctcaaaaaaaaaaaaagaaaaagaaaaaggaatgttatattaaatgtaccacggtaaaaaaaaaaatcataactgttactgtaaagaatggcaatgaatttttgctgctaggtcaccttaggtgggaacctaacaagatgtccttagaaaatgtaagattatttgactgaaacaactgcagtttaccaatagctttacgagggttctggtataaaataaggtacatggaaccggtaactattgagtatttaaacacgtatggaaagttctaataaatgtcagcattaggtcaatgaaacaaaacaaagcttaattcacaattttcaattgtacctatgtgcacatcaagtgctgctgatgacttatccgtggtgggatcactgataagaagtactttgataccattggccagctctagccctcgatattctcgcttgtcttcaggagacttggtaatgtgatttcctattctcttgatggctggattattcattttgctgtaagtctttttttggaaactgaaaagaaagagatttttaattgttgatttgtgactttatatttaaggacaaacaataacgtcaagtaaacccatataatacatcatcagatttttctaaatgctgaaggaaaccttttatagccactctacagggtgcagtcattcctttcctccctcttacccctcattctttctgagaaatgctaacaaaattgttttcatggagccatatttgtatctgaaagagcacatggatagggatttgagatagggtgggttagaccatgtgttggcctgtatgcagaactagaatagagttttttttgctggttttgtttttgtttttttgagacagggtctcagtttgtcaccgaggcttgtatgcagtagcgtgattttggctcactgcaggcctcaacctcctgggctcaagtggacctcatcctcctgtctcagtccccccaagcagctgggaccacaggcactcaacaccacacccagttaattttttgcattttttgtagagatgggatttcaacttgttacccatgctggtcttgaactcctgagctcaagccgtctgtccacctcagcctcccaatgtgctaggattacaagtgtgagccactacgccccgacctagaatagagttttatttcacactatttcagaggtatctgctagaataagtgaggtgagatgttgtgtaagaattattactgggttagcccaaacactgctcaaactgatgatattgaaagatagggtagatctggaactcgcaggtctgacatacacatgctcagaacatagggaacaactcccatagggaacaacccccaatgaggaacaatcctgtaaagttctaatataaaataagagaccggtgctgtcctatgacggcagcaataacaaggacataaaacaaacaaacaaaaagttggaaggaccccaagtatttttgtaacctgctgaagagctgaatgccagagcaggaaaagtctggcaatcttaacagaaatgtcagaaaaattctcttgcaaagggcttcctctgacagtcttctttcttctctacaaaggctagattacagtgatgggaaaggactatcagtacacagaatcatgtagggatgttggttgcaattagtgcagtgaagggactttccagagtctggggtacgcatgttttttgagagtagggtagatgtaacttttgtctatactggagattgcttaatagacaaaaaaaaaaaaaaactgaaactgctactactggcaggttaatatactgccagtatataattaagtaaagccaaaaacatatctggaactacagaggaaaaataaccctctatgagcacatctgcttcttacctacaagacaaaactaaacagatctgactgttccttaaagactgacagctagatttaaacgtaagtaagagggggaagaaataggcatacaattattttagataagttttttctgtgttaaaatctctagagattgagagaggaaaaaaaatctagtttgctttcaccattatattttcctctctgaaatcacctataactattcttccaatctgcataacaattgataaatcaaaggggtttgttgctactaagactgtcccctagatcccctagatcttttttttttttctctcgccctctcttacagtgctgatagatcttctttagaggagaggagatacggaattttaaagatcaacatatcacactaaatgtataatactggttttaaaaatcacatagtactttacaacagatagtgctaatggtctcctatttatagtaaaaatcatttcttgaaaaacaaagcataaaatataatactaacatattggggctatgttagtaggtcactgttggaaaattcaaaagcaacttgaaactgaaaagccattattaacaattattttcagccaggcacggtggctcgcgcctgtaatctcagcactttgggaggctgagacgggcggatcacaaggtcaggagatcaagatcatcctggccaacatggtgaaaccctgtctctactaaaaatacaaaaattagatgggtgtggtggcgtgcacctgtagtcccagctacctgggaggctgaggcaagagaatcgcttcaacccgggaggcaaaggttgcagtgagctgaggtcaagccactgcactccagcctggcgacagagtgagatcctgtctcaaagaaaaaaaaaaattattttctttctcattagccataagccactaaaattcaatggcaaagaacgatgaaaatatctgagtgccaagtctaaaaaatggtgtttgcggtaaaatagtaataattctcagggtgacaggaaatggtctattttagactctaaagaggggtacaaggaacctcagataacagtcctaggccaggcacagtgactcacgcctgtaatcctagcacttcgggagactgaggcgggcagatcatctgaggtcaggagtctgagaccagcctggtcaatatggtgaaaccccatctttactaaaaatacaagaaattagctggacatggtggcgggtgcctgtaatcccagctatttgggagactgaggcagcagaattgcttgaacccgggaggcagaggctgcagtgagccaagatcatgccactgcactccagcctgggcgcaacagagcgagactccgtctcaaaagaaaaaaaaaaaaaacagttctggttaagacatttggcaaaggacaatctgtttagactgcagcaaatgccttcagtgtgtacacagtttgtttcaaaaacattaatttgagttcaatataaattaaactatttttaaaaatgaatccaacttagcagcgacataacactaaataagccacaaggcagcctccattaagacacccagcaagaagggcagtgttaaaacggcagtgttaataagaacctccgtgtgtaccaaagagaatgcctgaacttaccccaggcaagaatctactccagggagaaaagaggttggtcttctggtgatagttatactcaatttcctctgtggtgcttgacctagtgagtttgacttaggtaaccaaaaattacaaatgactgaaatgtaataatgatgatgatgatgatggtctaaaacttctgtccaaaccacaactgtgtagaggggagatgaaatatagctcactttggaagtataaattaacttactatgtgggaggttaaaaactctatataaagataaccacctcaactataagctacactctgtactttttttcagggtttcaacttcccttatctggattttaatttttttagacaaaaaaaatttaaattgtaaaacacagagtaggatgtaggtagacagaacagttccagcccagtaagaactatttgcaaatgatcagaatccatcacagccatggatataacttatttggacgctgaagttgtgctggattaatattcctgatatggttgagaataaagagatagatttattctacaagtcacacataaaaattagtccaactactagtgtacaaaggatcaagaaaagctaaaaatttccaaggtggcaatactccctaatcaaatatcatgacttcttgaggaagtaaaacccaaaagaaatagtagcaacattttcaaacaaaacctattcctggcaatcctattcaatacaaagtctgggtttacctatagcatatctataaacacttcctacaacgatttgattctcaccttctggagaagtgaagacaatgactgggaactcttcctcctctgatgatgaattcatcaacagcttgcctgtctctgtatttatactcataagatcacctgtctatctacttcagatcattagcataaagccttcaagagtaattttatttatggcaaatgttctccaataagcaagcatactgacaatttagatgacgagctagtgttaactcaaatgctttcccagacatttatatttttaacttgttaaagttaaaattttaggagcaataaaattactttcaattctagggacattgtcatacactggaaacttcataaggcacagaactgtcttttcagcactctgataaactggagagatatttagtaattacaacatatattttgtcattctgctcagaatttaaaacaatgactataatcacagaagataaaagctggaagagccactagatgttatctagtcctttgcagttcagggactggctacactggcttctcctgggagcttgttaaaaatgcaaaatatcagaacccaccagagacctactgagccataatctgcattttaacaagatccccaggtgggctagatcccctcatcttacatacaaggaaactgaacctcaaggagtttaataaatcagttgcccaagatcatacaacaaaaagttataatcaaactcagtcttaactcccagtcctgtgtccagcctcccctccacatccaaacaaacacttaaggaagtctattaaggtccaggcatcacactatgcaaatggttacaaaaatgagtacaccagagcccttgttttgaaggaacctagactagtgatgaagtcagatataaaaacaggtcattatcttttttttctactttttgagacaaggtttcactctgtcacccaggcacaatcttggttcactatagcctcaacatcccgggctcaggtgatcctcccacctcagcctccccagtagctgggactataggcactcaccaccgtacccagctaattttttgttttgttttatagacagggtttcgccatgctggccagactggtctcgaactcctggcttcaagcaatccacccgccttggcctcccaaagttctgggactacaggcatgggccaccgtgcctagtctctaggtaatttttttgtagagatggggttttgccatgttgtccaggctggtctttcaaactcctgggcgcaagagactgccgccttggcctcccaaagtgctgggattacaggcatgagacactacacccagcccaggtcattatcttttaagtgtggtgacaaaactttccctggggcactatgggagtaaccctgtctaggagggggagtagaagcacaccaaataaaaggcaaggggacaatcaatcaaagtagaagggaattcgtgagcgaagcctgacaatgaggaaaaagcatgaggaatacagtggaaaaacaagaagcgtggtgctaatgaactacaacaggaactccaggtcaagatcatggactaagacatgtaaaggcctaaatttcaggtttgcaaaaacaaatccccaaatataaggtcatttccaaattccacaccaagagtaaattttactctgcaaagaatcttttattcaggtgacctttcagtctttctcatctctctttaaagtgtttcatgatcaatatagtagcagattgggaaattttactttgctttttgcttcctactcacctccattggtctctcacaaatttaaagtcagacctgatttagaaataatgacctataaacctgaacaggtgagtgatcacgttaatagtgaattacaaaccaaaacctcccttctgtggaatccatccacccactcccaaaaccataggtggaagtcaaggcctatagcactcatgcatgtggaggaggagcccagagagaaaaggcatggaatcaaaaccacaccacataacattcccagttccttgcagaaggtagaggtaaataagcagagggtgacaagatagtggtggtatgagcccaaggatgcctcaacatattaatgcttaagaccatataccccaagtactattaataatacatgaactaaaaaataacaacatgtcttagggaaccacctacccaaagctcttcagttataggaacaggtacacctaacttcatacaccagctagatcataaagttgggtacaaaataaaatcctgttaaacttattcacccctgatgttttgcctttgtgccaggcagaatatcagctatcgtaactctatgtcctggccctctggaaaggagtttatgatcaacaaataaacccttaaatgaagtagggtggttgcaatttaaagaaattctaaagtagtatcattctagagagaagtgcttttgcaaatgttgttttagtttgatgcatgcctatcaatggttgttcattccaaaagtgacaagcttaacacagaacactttatagaaacgttataaagtttaagcaagtgaataaaacctctgttttagaccttgtgccacagaggtaactatagaaagtttcttgtagtttgggtaccaagggtgtttcacaagtatccttcttccacatggagttttcagggctgttaggaaatgtaagatataggccgggtgccgtgggtcacgcctgtaatcccaacactttgggaggccgaggtgggcagatcacctgaggtcaagagtttgagaccagcctggccaacatggtgaaaccctgtctctactgaaaatacaaaaattagccaagcatgatggcgcatgcctgtaatcccagctacttgggaggctgaggcaggagaatcacttgaacccaggaagcggaggttgcagtgagccaagattgcgccactgcactccagcctgggtgacagagcgagacaccatctcaaaaaaaaaaaaaaaaagatagaataccattgtacaaatctaatcctaacaatcactctcatttttttaaagtgtcataggctttataaactgttcatttaatccttccattctccttaagtggtgggtcgtaacagctgttcgcagtcatcctcttcaactccaaatgagaaacaaaagctcagtcagtgcttgcatactaaagtataaccaaaaagaaaaaaaagaaaagataagtggttaagtgacttgcccaagggcaagctgattgtggtaaagctggaactacagagaaagaggaagcgtgggaaggggagggacagaggtggtgctgaaggaaatcatacactggtttattctccagctcctgtttatcaccctcacagtccttccctagccccattcttcttcccttacaatcccaaataacaaaagccaggaaacaaaaattaaactaggtcaaaataaatgctccaaggaaagttttcagtttttcactccttcttctgcatataaaacacaggtagtagggggagtctgcaatgcttctaatctaccaaaggaatcccttagctaagaaccataatacatggcaggattaaatgtataacaggtttaaagcaagagagtatatgtacagaactgactcatgcatgaaaggaaacataaaaacaagtactacagtagacatgaatgggtttaagtatactattttttaaaagtatacattaaaccatataatcagaaaaaagagaagaaaatcataatcatcttggtagctgcagaaaagtacttaaattcaacaaccattcacgtatttttttaaagtcagcaaactggaattaaatttatccattttaaaaagaatatcatagaaactatggtaattatcatactcaatggtatactcaatagtttacattacaattaatgtaaacaatctcccgccctcccccaccaacacgatgccactaacacttcttctatttcaacattgtattggtagttctaaccagtccaaataaaccaagaaaaagaaacaaaacacatagagatgggaaaggaaagaggaaaaaaattaacatgattctcaagcaatatgattatgtatatagaaaatcccaagaatctactgacaacttccacttctgggtaggatatagcagctcatggcaaactaattcagcttcaacaactagaaaaggccatgataaattacaaaaatcacatttgcaaagatgttggaaagttgtgcaagcaacaaggattggataaactagttccagaaaggtgagcaacctctgaggtgagctgataatcatcattcattttcttatctgggaatatctgctaattctgagtgcagactgaagatcatgcttgccctaagcaaagggactgtactggacgaagaggtattattgaggcttcagtggtggcatgaagttggtgtgacagattaaagtcccaggaggtcccaaatttgcaactaactttcccaacagaagattttctgagatactactatgtatttaccagaatggctaaaaagaaaaagagggcaaataccaagtgttagagaagttaacaaactctcacacactgctacagacatgcaatttggtatgggtacaaccattttcaaaaactggcactatacactaaagctcacactatgacctaacaatgctagtaacagataaataacccaaataaatgcatttatatgttcatagcaacactattcaaactagcccaaaccagaaatgatcaaatgacaatcaacagtgaaatgataaattgtacatgcacacaatggaaagtatacagcaataaaaaggaataatatagaacaaagcacaataaacatgaatctcactaatatagggttgagtgaaagaggctagacacaaaagagtaaatactgtaaccttccatttatacaaagcagaagagcaagtaaaatcaagctatgctttcatcccaggatagtcattacccttgggagtgggagtagtgattggatttggaaaggagaatgaagggggctttggggttccaggtcatgtgctggttatacaggtacgttcagtttgtaaaaatgcattaagttgaacactgccatctttcaattaaaagttcttaaaaatagagcttttcaaaatatcataaaacacagtaaaataaaaggaagggggagatacatgaattactgatattacaaatatcaaccgccaaaaatcatcctggaaatagtaccacttgaatactggaaagcagctacccataccaaagaggtgctaaactaagaaggctcactaaggaacagtagtacaattaacataattaaaccttctcaggtgtgtctcgagacaattatttcaattatttctgttgatgctatcttggccacaagaaataggaggcccatgtaagtacagcatcagtcaactaagttaattcagtatgctaaatcttttaactcaggactttactcattacatattatttgaaaactagcttttagtaattactttagactctagttaagatctaaaaataaaacttgacacttccagtaactaatagctaagtataacatagataaaagcaaaatgattaaactttgaataaattctcccctcaacaattttcaatatttataccaaacaacttctaattcaggatttgaatgagaaaaattatttttaaaacaaaattaaaagaataccatataacgttaacatttcttcaaactcaactaattttacatatgggcaacctcccacagatgcttcatgaacccagaacagcaagggcagcttaaagacacctgtcatggttttcttcttcttcttcttttttgtaagatagggtctcactcccagcgcccaggctggagtgcagtggcactatcatggctcatgacttcctgggctcaggtgatcctcccacctcagcctcctgcgcagctgggactacaggcatacgccaccatgcccggctaattttttgtatttttttttttttttagtagagacagggttttaccatgtttcccaggatgactcgaactcctgggctcaagcaatctgcccgcttcggcctcccaaaatgctgggattacaggcataagccactgcacctggcctggtttctaaagatcaattcaaatcacaggctgggaagagttatcgacctgtaagtaattctctcaagatagccttctaaaaaaagcaaaccataaatatcccttatcaaaaatggttgggatcagatgtatttcagattttcctggatttttaaatatttgcattacatttaccgatagagcatctactttgagcatcatgttggtgctcaaaaaatttagaattttggagcatttctgattttgaattttgaatttttcagatttggaatgctcaacctgtattctgtacagacagttcagttccactcatatgtacagaagatgatctgcccaactcagagaatgctgcctcaggaaacttgacctgtactttgccttaggtgtgattcttcactgtctgcactgatctactgaccacttccagcccgtgtttggtaattacataccctcacctttaccagatgacctctctgctcctgaggcactggatactactggactattctggtcaaaccagactttctggcctcatctagcttgtttttttaaaaaacagttctccctatgttgcgcaggctgaacttgaacacccaggcccaagcgatcctcccatctcagcctcccaagtaggatggtgtgccatcgtgcccatcttggcctcatctagttttgacaatcaagagtcagatgaggccaggcgcgatggctcatgcctgtaatcccagcactttgggaggccaaggcaggccgatcacctgaggtcgggagttcaagaccagcctgaccaacgtcgagaaactccatctctactaaaaacaccaaaattagccaggcgtggtgtcagactcctgtaatcccagctactcgggaggctgagcaggagaatcgcttgaacccaggaggcagaggttgcggtgaaccaagattgtgccactgcactccaacctgggcaacaagagcaaaactccatctcaaaaaaaaaaaaaaaaaaaaaaaaaaaaagagtcagatgaaatgtatacatggctcattaaattgacaggggcacctatagttgcatcacactcagacaacctttcacagagtttctcctgtaaaatatgtttatataaacttcaccaaggcatagttcctggtacacagtagtcatccatgaatggtaacttgattattataaaatcatcatcattattatggtcgcagtggctaaggtgcaaatgaaccacctccataaccaccatgttattaccagcattcttaacacatacttatgtgaattccagatgttatttgtcatctctggaggtcaaaaacattcattaggtaggctgataataggattatactttataagactattaggaaaccaggtaaataattatccctttataattgctatagatgagccagtgtttatagtaagtagttctcaatgggtgactattcccactcaccaaccctcgctgaggacatatggcaatgactagaggcattttttattgtcacaactgaaggtgctaatggcacatagtgagtagaggccagggatgccactaagcaacctacactgtatgggatatctcccacaagaaagaattatatgatccacacctgtaatcccagcactttgggaggctgaggcgggcggatcacatgaggtcaggagttagaaaccagcctggccaacatattgaaacactgtctctactaaaaatacaaaaatcagctgggcatggtggcacaaacctgtaatcccagctactcgggaggctgaggcacaagaatcagttgaatctgggaggcggatgttgtgtgagccaagactgtgccactgcactccagcctgggcaacagagtgagactgtgtcttaaaaaaaaaaaagattttggcacaaaatatcaatagtgctaaggatgaaagaccctagcttatagttctgattttattacccccaaaataatggatgaaaatcaatgcaaccaattctatccacttaaatccaagagacagcctcattaaagtacagaacgcttctataattaaactcccatctatgtatctacatatctctcaatcaatcaatcaatcaatcaacatctaagccacaaaagatttacataaagagaggagaaaaactgataatgaaagagaaagagagaaggaaactttacaggaaccttgtcctagagtaaggaatctagtacgtaagtgaaggggttaagcttagaaagaagcaaagccagtatgtcagaacagatgcttactgaatactcagtcagtatcttgtggcacatatacttgtttagggaataaatctattatatattatacatatatataatatattcaataaaccccttatatagatcctattagtcccattctttactggatggggaaattaaagctcagaaaagttatttggttggaaccacataggtataaaatagaagagctaggattcaaacccaagtctttagacacaaaatgaccatgctgtttaacactccaccaagttaaaagttcatctcaacactttgggaggccgaggcaggcagatcacctgaggtcaggagttcaagaccagcctgaacaacatggagaaaccccgtctccactaaaaatacaaaattagctgggcatggtggcgcatacctgcaatcccagctactcgggaggctgaggcaggagaatctcttgaacctgagaagtggaggtcgcagcaagctgagatcacgccattgcacgtcagcctgggccatctcaaaaactaagtaaataagtaaataaataaataaactgacctatattaaaataaaaaatttctgtgcaaaggacacagtgaaaaggcaacctgtggagtgggaaaaaatatctgataaggggttaatatccagaatatattaaaatctgcaacaaaacaacaaaaaatttctaaatgggcaaaggtcttaaaaagccacttctccaaagaagatatacaaatggccaataagcatataaaaagatgctcaacatcactaatcattagaaaagtacaaatcaaaactaaaatgaagtaccacttcataccaattaggataattattttaaaaacactgtgaatacaaaaaattagccgggtgtggtggcaggtgcctgtagtcccagccaatcgggaggctgagacaggagaatggtgtgaacccaggaggcggagcttgcagtgagcagagatagcgccactacactccagcctgggcaacagagctagactccgtctcaaaaaaaaaaaaaaaaaaaaaaaatcgtggccaacatggtgaaaccccgtttctactaaaaatataaaaattagctgggcgtggtggcatgcgcctgtagtcccagctactcaggaggctgaggcaggagaatggcatgaacctggaaggcagagcttgcagtgagccgagatcgtgccattgcactccagcctggcaacagagcgagactcggtctcaaaaaataatattaaaaaataaaatagaataaataataagtgcaggtgaggatgtagaaaaactggaacctgtgcacacttgctagtgggaatacaaaatggtacagcagtatggaaaactgtatggcagttcctcagaaaattagaaatagaattaccatgtgatctaacaattccacttctggatacatatacaaaagaaatgaaaccaaagactcaaacagatatttgtacagctatgttcatagcagcagtactggcaacagccaaaaggtggaagtcacgccagtgtccactgatggatgaatcagtaaacaaaacgtagtttatacaataaaatttattcagccttaaaaaggaaaaaaattctggcacatgctaccatatgaacctagaagacatactaaatgaaataagctggctgggtgcagtggctcatgcctgcaatcccagcactttgggaggctaaggcaggtggatcaggaggtcaagagatcgagaccatcctggccaacacggtgaaaccccatctctactaaaaatacaaaaattagctgggagtggtggtgcacacctatagtcccagatactcaggaggctgaggcaggagaattgcttgaacccgggaggcagaggttgcagttaggcaagactgcaccactgcactccagcctggtgacagagcaagactccatctcaaaaaaaaaaaaaaaaaaagaaaagaaatcagctaatcacaaaaggacaaatactacacaactccacttatataaggtacctagagtagtcaaattcacagacagaaaacagacaggtggttgcaagggtctgaagggaggggaaatggtgagttattatttgatgggtacagagtttcagtttggtgagatgaaaaaagttctagagatggatgatggtgatggttacacaacaacgtggatgtatttactgccaccgaacaatacacttaaaaatgctcaaaatgggccaggtgcagtggctcatgcttgttaccccagtactttggaaagccaaggtaggaagatcacttgaggccaggagtttgagaccagtctgggcaacatagtcagaccccatctatacacacacacaaaaaggtcaaaatgataaattttatgttacatattctttatcacaataataaaaccaaccatgatgggggggtggggtgagaaacaatcaatattctaacaaactaacctaacaactataaatgagtaacataatcacattgaaggagtgtaaaagaaaagaacttaactatggaaagctggattttgactggatacaataaagcctaagagaaaaagaactacatgcaaatattgtgacctattttaaaaatgtttctcacaggtgagctagcaattatgaaactatgtgtacactagaattgaggaaataagaaagtaaattgtagaaaatgaaatccagtgttctcattgttggaaaaagatgttataaataagaaatgggagaaggctacaattgtggtactaagttggaatcaaaggtatcaatacaaacttatatttttattatatacaaaaagacatagaaatataaaaacgtgtatatgtggctgtccaccagaggcactagactggccggccactagaagcaatgacacctcagcaacaatgagcacatctagtgcccagatcttggtctgcgaagattattttctgctcaggtgagttggctcacgcctgtaatcccaggactttgggaggctgaggcgagcagatcacctcaggtcaggagtttgagaccagtgtggctaacatggtgaactcccatctctactaaaaatacaaaaattagccaggcatggtggcacatgcctgtaatcccagctacctggaggctgaggcaggagaattgcttgaacctgggaggcagagattgcaatgagccgagatcacaccattgtactccagcctgggtgacagagtaagactcagtctcaaaaaaaaaaaaaaaaaaaaattattttccaataaaaggaactaagtgattgattcaagggctagggcaagaaaaatatgagtctagaacagaagtaaaacaatactctaaaaaagatggggcttattcaaaatacacaggagccaaaatgaagaaactcctaagggtccaagccataataatttgagcaacaaaacaaagaacgatagtactgaattttcagccgtaagttaagataaatgtatgttcatagcaatataaataaataagaaaaagaaaaagcaggctgggcatggtggctcacacctgtaatcccagcactttgggaggctgaggaaggcggatcacctgaagtcaggagttctagaccaggttggccaacatggtgaaatcctgtctctattaaaaatacaaaaattagccaggtgtggtggcacacgcctgtagtcccaggtactcaggaagctgaggcaggagaattgcttgaacttgggaggcagaggttgcagtgagccaagactatgccactgcactccagcctgggcaacagagtgagactctgtctcaaaaaaaaaaaaaaagaataccaatctttctcaaattcttccaaaaaagaagagagaatacctccaaactcattttatgaaatcagtattaccctgatactaaagccagacaaggacattacaagaaaagaaaactacaggccaataaccttgatgaatatagacaaacatttagccagactaagaaaaaaagagagacaacacaaaatcagagatgaaaaaggagacattacaactgataccgcaaaaattcaaaagatcattagtggctattatgagcaactatatgccaataaattgaaaaatctagaaaaaatggataaattcctagacacatacaacctaccaagattgaaccatgaagaaatccaaaacctgaacacaccaacaagtaacaagattgaagccataataaaaagtctcctagcaaagaaaagcccaggacccatggctttcctgctgaattctactaaatatttaaagaactaataccaattctactcaaattattccaaaaaatagacaaggaaggaataactccaaactcattctatgaggccagtattaccctgataccaaaactacacaaagacacatcaaaaaaggaaaactacaggccaatatcactgatgaatattgatgcaaataccctcaacaaaatactagcaaaccaaattcaacagcacgttaaaaggatcattcaccttgatcaagtgagatttatcccggcaatgcaaggatggttcaacatcaacacacttattgcaaatcaataaatgtgatataccacattaacagaatgaagggggaacaaccccacacaatcatctcaatagatgcagaaaaaaggctaagtatagtggctcatgcctgtcatcccagcattttgggaggctggggtgggaggatggcttgaattcaagagctcaagactagcctgggcaacacagcaagataccgtctctacaaaaacagctgggcatgatggcacatgcctatattcccaagtactcagggatgctaaggtagaaaggtcccttgagcccaagagtttaggtctgcagtgagccatgattgcaccactgcactccaatcaggctgacaagaatgcaacagtgtcttaaaaaaaaaaaaaaaaagatggccaggtgcagtggctcatgcctgtaatcccaacactttgagaggccaaggcaggcggatcacttgaagtcaggagttcgagaccagtctgaccaacatgggaaaaccccgtctctactaaaaatacaaaattagccaagcgtggtggcacatgcctgtaatcccagctactcgggaggctgaggcagaagaattgcttgaacctgggaggcagaggttgcagtgagccaagatctcaccactgtactcttgcactctagcctgagcaacaagagcaaaattccatctcaaaaaaaaaacaaacagaaaaatacctcttcacagatagctttcagatgccacatgcaggagctgtgaaaaaaggggggaaaaatagagcagaaaaataatttgacaaaattcaacagcctttcacggtaaaaactctcaacaaattaggtatacaaggaatacctccattgtgtacttcagtacaataagagccatggaagacaagcaaacaatgaacgtattcagcagtgaaaagctgaaagcctttcctctataatcaggaacaagcatgacaaggatgcccactctcatttctattcatcaatgataattttctgattctgatggtattgtgatgatatagaaaatcacactaaagaggccgggcacagtggctcacgcctgtaatcccaacactttgggagctgagatggggggatcaccagaggccaggagttcaagaccagcctgaccaacatggtgaaatcccatctctactaaaaatacagaattagccaggcatggtggcacatacctgtaatcccagctacttgggaaactgaggcagcagaatcacttgaacccaggaggcggaggttgcggtgagccgtgatagtgccattgcactccagcctgggcaacaagaaaaaaactttgtctcaaaaaaaaaaaaaaaaagaaaatcacactaaagtatccaatggtcaaattactgtaattggttcaggaaaaaaattatttgcactatattgtacaataaaaacttttcagtatgagattgtttcaaaaatacagtatatctctttcatgacaaaaatgctgatcaaactaggaataaaagagaatttcctcaacctgaaaaagggactctatgaataagctactgctagcatcgtacttaatggtgacagataatgtttttaccattaagatcaagaagatgacaaggatttccactcttgccacttctattcaacactgtcctggaagttctaaacagaccaattaggcaagaaaatgaaataaacggcgtacaaattagaaagaaaaaagtaggccgggcgcggtggctcacgcctgtaatcccagcactttgggaggccgaggcgggtggatcacgaggtcaggagatcgagaccatcctggctaacaaggtgaaaccccgtctctactaaaaatacaaaaaattagcggggcgcggtggcgggcgcctgtagtcccagctactcgggaggctgaggcaggagaatggcgtgaacccgggaagcagagcttgcagtgagccgagattgcaccactgcagtccgcagtccggcctgggtgacagagcgagactccgtctcaaaaaaaaaaaaaaaaaaaaagaaagaaaaaagtaaaattagctccatttgcagaagacatgatcttgaatataaaaatatcaattgtatttccatacagtagcaatgaacaaactaaaaataagaaaacaattaataatagcatcaaaaaataaaatactgggtgggcacagtggctcatgcctgtaatcctagcactttgagaggctgaggcgggtggatgacctgaggtcaggagttcgagaccagcctaaccaacatggtgaaaccctgtctctacaaaaaatacgaaaatcaggctgggtgcagtggctcacccctataatcccagcactttgggaggccaaggcaggtgatcacctgaggtcaggagttcgagaccagcctggccaacatggtgaaaccctgtctctactaaaactacaaaaattagccgggcgtggtggtgggtacctgtaatcccagctactcgggaggctgaggcaggagaatcgcttggacccaggaggcggaggttgcagtgagctgagatcgcgccactgcactccagcctgggcaacagagcgaaagtctgtctcaaaaacaaaaacaaaaattagctgaacacggtggtgggcgcctgtaatcccagctactagggaggctgagacaggagaattgcttgaacctgggaggtggaggttgcagtgagccaagatcttgccattgcactccacctgggctacagagtgagactccgcctcaaaaaaaaaaaaaaaaaacttatgcataaatttaacaaaagaaatgtaaaacttaaactttaaatggaaagactcccatgttcatggatgggaagacagtatttttaagataacagtaatccccaaatagattaaaatcccacctaagcctccttttttgcagaaattgacaaattgatcctaaaacttgtttggaaatgcagaggacccagaatggtcaaaaaagtcttgagaaagaagaacaaagctggaagactcaaactgcctgacttcaaaacaattgtaagcaaaatagtgtggtactggcatcaggataaacatacagattaatgggccaggcacggcggctcacacctgtaatcccagcactttgggaggccgaggggggtggatcacgaggtcaggagatcgagaacaacctggataacatggtgcaaccccatctctactaaaaatacaaaaaattagccaggcttggtggcgggcgcctgtagtcccagctactcaggaggctgaggcaggagaatggtgtgaacctgagaggcggagcttgcagtaagccaagatagtgccactgcagtccagcctgggagaaagactccatctcaaaaaaaaccatacagattaatggaacagaacagaaagctcagagttaaaccctcaccttttgatcaatttatttttgaaaaggatgatggccgggcatgttgtaatcccagcactttgggaggccaaggtaggcagatcacttgatgccaggagttcgagactagcctggcgaagatggtgaaacaccatttctactaaaaatacaaaaattatctgggcatggtggccaacacctgtagtcccagctactcaggaggctgaggcataagaattgtttaaacctgggaggcggaggttgcagtcactgcactacaacctgggcaacagagcaagattccacctcaaaaaaaaaaaaaaaaaaaggatgcaaaacaattcaatgaggaaggactagtcttttcaacaaatggtactggatatccacatgtaaaaagatgaagttggactctcacctcacaccatacataaaaactaattcaaaatagatcaaagacttccatgtaacagctaaataattaaacaatacaaccttttttttgagatagtgttttgctcttgttgcccaggctggagtgcaaaggcgtgatctcagctcaccgcaacgtccacctcccgggttcaagcgattctcctgtctcagtctcctgagtagctgggattacaggtgcctgtcactacgccaggctaatttttggtatttttagtacagacagggtttcaccatgttagccaggctggtctcaaactcctgacctcaggtgatccgcccacctcggcctcccaaagtgctaggattacaggtgtgagccaccatgcctggccaataatacaaatcttaaaagaaaacttaaatctttgtgaccttggattgggcagtggcttcttagatatgacatcaaaagcacaaccagttttttaaaaagacaaattagacttcaacaaaatttaacactttctgcttcaaagaacaccatcaagaaagtgaaaagacaacctatagaatggcataaaatatttgtaaatcatatatctgataagggacttgtatagagaatatattttttcatttgtatttttttgaagatggagtttcactctcgtcacccaggctggagtgcagtggcacgatcttgcctcactgcaacctctgcctcaagggttcaagcgattctcctgcctcagtctcccgagtagctggggttacaggcgtgtaccaccatgcccggctaatttttgtattattagtagagatggggtttcaccttgttggtcaggctggtcctgaactcctgactgcaggtgatccacctgcctcatcctcccaaagtgctgggattacaggcatgagccaacacgcccggcctagagaatatattttaaaactcttacaactttaataaaaaaaaaaaaaaacccaattaacaaatagaaaaaggatctgagtagacatttctctaaagaagatatataaatggccaagaagcatatgaaaatatactcactggtcatcaggaaaatgaaagtcaaaattccaatgagacaccacttcatacccaccaggatggcttataacaaaagtacatatagcaagtgttgtcaaggatatagagaaattggaattttcacacactgctggtggaaatgcaaaatagtgccgctgctttgaaaaacaacctggtagttcctgaaaaggttaaacacaagagttagcatatgacctagcaattccgctcctatgcatatccccaagagaaacgaaaataagtgttcacatgaaaacttgtacacgaatgcccaaagcagtattattcattatatctcaagactggaaataatccaaatgtccatcaactaatgaatggataaatacaatctggtctatccatacaatgcaatactatgagtactaaaaaggaatgaagtactgacacatacctcaatatgaatgaactttgaaaacattatgttaagtgaaagccagacacaaaagaccacatattgtttgatgtcatttgtatgaatggtccagaacaggcaaatccatagaaagaaagatgagtggctgccatgggctcagggaagagtggaatagagtgtaactgccaaagggtataatgtttctttttgaggtgacgaaaatgttttaaaatgattgtggtgatggttgcacaactctgcaaatacactaaaacccatgaatggtatattttttttttttttttttttgagacagggtatcactgtcacccaggctggagtgcaatggtgtaatcatggctcattgcagctttgacttccccggctcaagcaatcctcccgcctcagcctctggaatagttgagattactggcacgtgcctccacactcggctaattttttattttttgtagagatagggtcccactatgttgcacaggctagtttccaactcttggactcaagcaatcctcctgcctcagtctgggagtcacaggatttacttatttaaaaactcaattgtttaagggaaagagttaaactctagtgtgcttcattgatttcctctgccccttttgctgttttatgacaattcctaatttgttcattaatatttctagaaagatgctatgttgttgccatataataatatcgataatagtttggctggttgactgtaagtacaaataacatattcattttccttaaaagtctgttagtttaaccgtgtatctgactggccagatagtcttgtctatttggcttctgggaacggtgtcttcccagtgtcaacgttcctatctgccttatttatgtgacctgactgaccagaaatcctaatgtagccatcttgctccaaaaggttcttggtcttccctaccttgttacattacactcatcgtcttcttgacttactgtacactgtttgctctcttttctccctctcttcttggtgagcaactcaagagatgcctcaaaggttgagagaagtgagctgggcatggtggctcacacctgtaatcccagcacttcgggaggccctagcacgtggatcacctgaggacaggagttcaagacgagcctgttcaacaaggggaaacctcgtctctactaaaaatacaaaaattagccaggcatggtggtgcgcacctgtagtctcagctactcaggaggctgaggcagaagaatcacttgaacccaggaggcggaggttgcagtgagccaagatggagccactgcactccagcctaggcgacagagcgagactccgtctcaaaaaaaaaaaaagattgagagaagtgacttgttactccttttatgcatgctcacagagctcaggctgatagctccacttactttcctagaagcaaagctaacatgctcttccacacccaccaccttcactccatcctcacctgggttctagacaataaggcgaactcaggccgggtgtggtggctcaggctgggcgtggtggctcacacctgtaatcccagaactttgggaggccaaggtggatggatcacctgaggtcaggagttcgagaccagcttggccaacatggtgaaaccctgtctttctactaaaaaaatacaaacattagcgggcacggtggtgggcgcctgtaatcccagctattcaggaggctgaggcaggagaatcacttcaacctgggaggcggaggttgcagtaagccgagatggcaccactgcactccagcctgggcaacaagagtgaaactccgtctaaaaaaaaaataaataagtaaataaataaataagtaaggcgaactcagcagtagcacagctgtctaaagtagacttcctaagagctgtgggacttttcatttctctgtcaacctcctatagttgccataaggatcaaataagatgatgtgataatcttcgtaaactttaaatgaggcaaagggtagtcctgcaaggatcaaataagatgatgtaagctgggcgtggcagctcacgcctgtaatcccagccctttgggaggccgaggcgggcggatcacctgaggtcaggagttcaagaccatcctggctaacatggtgaaaccccatctctaataaaaatacaaaaaaaaaaaaaaattagctgggcgtggtggtgggtgcctgtagtcccagctacttgggaggctgaggcaggagaatggcttgaacacgggaggcggagcttgcagtgagcggagatcgcgccactgcactccagcctgggtgacagagcgagactccgtcaccaaaaaaaaataaaataaaataagatgatgtgataatcttcgtaaactttaaatgaggcaaagggtagtcctgattacacaatcatttctgtactttcggagcaatttacatgtgtattttgtttcatttttattattaacaaaaacctccagtatgtctgaaaactactaagactaacttcctccaatcactgtatagaacggatcacaaatataatgtttacaaggccaaaaaagtaatgtaaataagcaaagcaggctgtaagaaggaatgcatgccccttctgaaagacaaatcttccctagctcaagctaattgctgccaggcaggaatgtgggcccactgttaccagattatccctttttcccaaaaggaactgaactctcaggatttctaagtgttgattcccatttaaaaaataacaactgcaaaacatatccacatgccacatcccagcctactggtctacagtgacctcatttatagtcggtcatactctctaaaataaaagcaacatcaagtgaggagttagtgatatgtaagcacaagaaaggaaaaagaactatgcacctgtagaaggcaacgttcagaaaccaaaacttggtaggattaataaagatatttgaagctacttagtctggtggctaggaaaaagactcatgcaaactaaccaattcaagataaaaagaataaccaagtgtcaagtcagagtgacttttccactacatcacactggctcccaaatggatagactatagagagaataaggcatttttttcaactggatggcagtttaaagtagtctggagtacaaacttagaacaggtgtcaatcttactgatatcttcctggaacagaagctgaattcaagaatattttaccctggaccaaatgttatccaacactcccagcctatattggccatcagcagagcatacagaaaccacagagtagcccaacaatgggaagggagaaactttcaccaactcaagaaagaaaaaaaagaaggaaaatcaggtgactaatgtttgttttcattatttcttgttttaaaagcaaaatttcaaatttacttcctccataaaaagaaaagcaggctgggtgtggtggctcacgtctgtaatcccagcactttgggaggccaaggcgggtggatcatctgaagtcaggagttcaagaccagcctggtcaacatggtgaaaccctggctgggcacagtggctcacgcctgtaatcccagcactttgggaggccgaggtggacagatcaactgaagtcaggcgttcgagaccagcctggccaacatggtgaaaccacgtctctactaaaagtacaaaaattagccgggcgtggtggcaggcgcctgtaatcccagctacttgggaggctgagacaggagaattgcttgaacccgggacgcggaggttgcagtgagccaagaccacatcattgcactccagcctgggcaacaagagcaaaactccacctcgggggggaaaaaaccatggtgaaacccccatctctactaaaaatacaaaaattagctgggtgtgtgggtgcatgcctgtagttccagctccttaggaggctgaagcaggagaatcacttgaatctgggatgcggagtttgcagtgagccaagattgcaccattgcactccagcctgggctacagagtgagactctgtctcaaaaagaaaaaaaaaaaaaggctgggcatggtggctcaaacctgtaattccagcactttgggaggctgaggcgggcagataacaaggtcaagagattgagaccatcctggccaacatggtgaaaccccatctctactaaaaatataaaaattagctgggtgtggtggcacgcgcctgtagtcccaactacttgggaggctgaggcagagaatcgcttcaacctggggcagggggcagaggttgcagtgagccgggatcacgccactgcactctagctgggcagctgagcaagactccgtctcaaaaaaaaaagaaagaaaaaaagaaaagaaaagcaaatctttaagttcaattaaaaaaatcttaaagttcaattttaaagggaggggaaaaaagaagccatatgtcttttttgtcaaagtctcacaaaggatatccctgaaagcttgctgctttaaccatatgctagataacctgtaaaataacttaattcccaagtacttacaatactagaattctagagctagatggagggagtggaagccattcaggtcatctctctcacttttgtagtcttattctacaaaggtgtagattcacactaggacccagatctatacttttctgtttggaaatcaccagaagatctacaaaaagttatctcccatgtagtctttacatgaaagcttgttccaatatacaactactcttgaatgaaggagcaagccaagaaagaaaaaaatttgagaaccaggaaacagatccattagaggagagaagcaaagggaaattccaggcaaccattctgtagcaagcctggagaaaactagttcaaactacagcaagaaggaaaaagtgtcctgaaggatagtctccaaggagaaaatatggaaccaatagatcatctaatagatttgatcatataagaaactgtactaggccgggcaaggtaacttacacctgtaatcccagcactttaggaggcagaggccggcagatcacttgaggtcaggagttggagaccagcctggccaacatgacgaaaccctgtctctctactaaaaaaacacaaaaattagtgggcatggtggcacacgcctgtagtcccagctactcaggaggctgaggcaggagaatgcttgaacacgagagacaggggttgcagtaagccgagactgcgccactgcattccagcctgggcgataaagcgagactgtctcaaaaaaaaaaaaaaaaaaaaaaaaaaaaaaaaaaaaaaactgaaactgtactaaatgtccataggaccataagatcaagtgggaagaatcagaaatatgtaaacagttgggtgtgatggctcatacctgtaatccttgctacttgggaggctaagcagaacgatcacttgaggccaggagttcaagaccaacctctgcaacacagtaagaccccatctctaaaaaaataaaatagctgggcataacaaagcaacagaaaatttctaaaattaagagatcaagaaataacagtagccaggtgtgctggctcatgcctgtaatcccagcactttgggaggctgaggtgggttgatcacctgaggtcaggagtttgagaccagcctggccaacatggtgaaaccccatctctactaaaaatataaaaaaattagccggcgtggtagcgggcgcctgtaattccagctactcaggaggatgaaacagaattgcttgaacccaggaggcggaggctgcagtgggtcaagatctcgccactgcactccagcctgggtgacagagcgagactctgtctcagaaaaaaaaaaaaaaaaagaaaaaattagctgggcatggtggtgggcacctgtaattgcagctactcaggaggctaaggaatgagaattgcttgaactcaggagacagaggttgcagtgagcaccactgcactccagcctgggcaacacagcgagactccatctcaaaaaaaaaaaaaaaagaaaagaaagaaagaaatggtatttgttcttttctcaagaccctattctccccaaaatctctttggctagaacttcagactatttcacttccgatatcatcttccacctctctaactcccaacctctccaactatgtttccttcttatacctaaatgtgagcattgtcaaggctgccccctcccccaccgcatctaaacatagattatttttcctatatccatccatgtccgtgtcttcaactctatcttcagatttaggaaatcagctcaggccttcttaccaagttccagtcatatttcaaatgcttcctgcagatctccccttggctatccagtaatcacttcagactcaatatcatcaactaccatgtatattctttctaaaaaatctccctgttttaacgtccccatctctactaaagatatcgtgctacctctaggaagaagacaatataatggccaacccctgaggttcttgagtgagcccagttgaattcatatctcgctaagccacttactagctgtgtatccttgagcaagttaacctctttgagcttcaatatccttatctgaaagaaaaaaaaaaaagactaccaccaccactctcccacataattaccgtggccattaaacaagacaacatatgtagccaggtgcagtggctcacgcctataatcccagtactttgggaggccaaggtaggtggactgcttgaaccgaggagtttaagaccagtctgggcaacatgacgaaatcctgtctctacaaaaaaaaaaaaaaactccaaaaaattagccaggtatggtggtatgtgccaagttccagctactagccccagctacccaggaaacaggggagtactgagatggcaggagaatcacctgagcccagagaggtcaaggctgcagtgagccctgatcacgccactgcactccacctaggagtgacagagtcagactctatctctctctctctctctctctctctcacacacacacacacacacacacacaacataggcaaagctcctaataaaatgcataaactggaggttatgatgataagtgaaatacgccaggcacagaatgacagacatcacatgttcttacttatttgtgggatctaaaaatcaaaacaattgaattcatggagatagagagtagaaggatggttactagaggctgggaagggtagtgggtggttgagggcaggtggggatggttaatgggtaccaaagaaaaaaaaaaagacctaggatttgatagcacaacagggtgactataatcaataataattgcacatttcaaaataactaaaagagtttaattggattgtttgtaacaaagaataaatgcttgaggggatgactaccccccacccaaaaaagcataacatacaataagcattcaataaatattagctactaaatcttttatggttaacatcgtcagcagcagcaagagcgttacagctgaatccacttagaccccagcacaggtcagacttgttctaggctctggatccatttcctatccttaagcaaaacaaataagaaaccccagtagtaggtcagtattcatcaatgtggttctgatctttcaattgaactagtccctgagctaccaatctacaaactagatttcattcccttgggtatttaaggaccgctcagtcctgtccactaccctacgggacctgagggtaacagccagcccaaaagtgcctacaagactgtgcccactgctgtacccaagcagtggttcgttctcttggtatgcctttggaaaacctgccacctgccaggcaggacaaacatctcacctagctgaacttcttcccagagctgggtctccccgacaagagttttccctaccctggtggcccctcctattctagactcaaagtcactcacgctcaagacctcaggcttctctgactcccacatcgtccctacatcaatcaataactaaactctgctgaatccttcttgcacatgtcttctgcagacactcttctttccttgtcatttgtactaccttctttatccctcatcagtctctgcctgcgtttcaaacagtgcttacaaaaaacagccagattaattagccaaaaatacagctttcatatgtcactgaattgctcaaaaagcatctgaggttctctatatccaataagacaaaatttcactttcctttgctgatattgtgaatttccctacttttgaacctttgctaataccattccttctatctaaaatattttctcttctggttgtggtggcttatgcctgtaatcacagcactttgggaggcagaggcaggaagattgcttgaagccaggagttagagatcagtatggacaacatagcaagatcctgcctctacaaaattttaaaaattagccaggcatggtggcacaagtctgtagtcctagctacaggaggctgaggtgagaggatcacttgagcccaggagttcatggctgcagtgagttttgatcgtgccactgcactccagcctgggtgacagtgagatcctgtctccaaaaaataaaatattttctcaactctccttctttgttcatccaattcaatatttccttcaaagactcttgttcaaatcctatgttctctgcaaagctctcgccattcttactagcagcagggtgttctcagcagagggaaaacaatgcaaatgatctgaggtaagagcaagtcaagcaagtagaccagtgtgactcacattgttgagtaggaagtttattactcaaacctgaaatttgagggagaggttctggctagagaaatacatttgggagttgtcagaatatagattaggcctatcttacagaatttttgcaatgatcaatatgataccagggcatacttgcatgactgccattcagcagtgaactcatacatctttatgaatgatgttaaatgaaagttaaatgaaaaaaagtaactcagaaaagtttgcaataaaggtcaaaagctataaaactaaaataaacaataaaactaaacaatatactgcttaagaagtattcaaatgtgataaaactataaagaaaactaaggaaattgttatccaaatatagaataatacagccgggcacggtggcccacgcctgtaatcccagcactttgggaggctgaggtgggtggatcacctgaggtcaggggtttaagaccagcctgggcaacatggtgaaaccccatgtctactaaaaatacaaaaattagccgggcgtggtggcacgcgcctgtagtcccagctacttgggaggctgaggcaggagaatcgcctgaagctgggagatggaggttgcagtgagccgagattgcgccactgtactctagcctgggcaacaagggcagactctttctcaaaaaaaaaaataataataataataataacaatacctttacaggggaggagcagagttataattggacaggtgagcacagacaggttcaaagttgctggaaatgtttgtttcctaaagtagatggtacacaggtgtttttttcttctttgtcctatatactctggcatgtacaatattaaataagagagtaaaaaaataagaggcaatatataaacatcaaatagatgtttcacaatgtttttaaaaattattaagttgagaaaaaggaagagtaattgtgtgacctgtataacaaggcctaaaaagaataaaggatttagtcatataaagaaaagacagaaagggcatctcggaattgggaatgaataggtcatgtaaaaggagacagcaaattggtaagtctgactggagaagagttaggctgaaaagttgggctaagccagccaacagaatgcttacatgctgggtcaagaagtttgaacttgatcttgaaatagcacagaaccactggtgatatttaggcgagacaacagcttgggaaaagtggtttattaatctgatgtgatgataagaatcaactagtagggagacagaaggctggaaaagtcagttctaaaacctgttcaggtgagataatctcactgatgtaagatgttacgaagatgatcatggcctgaactaggatggtgatgagggtcaagatcactccaagaaactttaggaatctttaggatgaaagactcaggaggattgggtcttgggaataggcaatgagggaaaaagattcaaagattttcaagctaaactgaaaactctcattttcaagctaaactgaaaaaatgataacaacatagcaaaactaaggactctacagaaaaaaattgttttgaaaaaagaccattaatcaattaagttatgcagtaaatatgtactgagtacctactatgtgtcaggcagagtgtgatgccttcccttcagaaagcagattgtgagtcctactttaaaaagttattccgagcgcagtggctcacgcctgtaatccgagcactttgggaggccaaggtgggcagatcacctgaagtcaggagttcaagaccagcctggccatcatggtgaaatcccagctctactaaaaatacaaaaattagttgtgtgtggtggcacacacctgtaatcccagctactctggaggctgaggcagaagaatcacttgaacccgggaggtggaagttgcagtgagccaagatcgtgtcactctccagcctgggcaacagaacaagactcagtctcaaaaaaaaaaaaagttacacttttaataggcaaaaagaaactaaacagttctttgagaagaataaaataattttgtgagtcccactttttaaaaaagtaatcagtatggtgataaaatactaagttgtttttcaaaattaattgaaagaaacaacaaaacataaaagtggaggtgtctagtaaaaggtcagaggtaaagcagtttactgtttattactgaaagctccttgaggacaagatttatggttatctttgcatttacatagtactggacacagtgtgtgatcactacagagtagacattcaaataatgtctaaactaacagaacagtgaaaacagactgaagacaagccaaatgagaaggctccagaacctaacatatctatagaggatctacccctgtggagggaaagtgctctagccttgtcatcctggctaaaaggtagcctgatcctctggctacatgtttaggagatataaaataccaacagaaaaacagaaaggaaaccagtgtttatgaaacatatactgggcctggcacagtggctcatgcctgtaaccccagcactttgggaggcagggggattgcttcagcccaggagtttgagaccaccctgggcaacatgacaaaaccccatctctaccaaaaatacaaaaattagttgtggggtggtggcatgagcctgcagtcccagctactcaggaggctgaggtgggaggatcacttgaacccaagagatgaaggctgcagtgagctgagatcacatcactgcactccagcctgggcgacagagtgaaaccctgtctcgaactttaaaaaaaagaaaacatactgaactttttctcccctaccctggggagactgtccccaaccctaacttctttttttttaagacacagtctcgctcagtcacccaggctggagtgcagtggcacgatctcagctcactgcacctccgcctcctgggttcaagcgattctcctgcctcagcctcccgggttcaagcgattctcctgcctcagcctcatgagtagctgggattacaagcgcccaccaccacgcccggctaatttttttgtatttttagtagagatggggtttcaccatgttgcccaggctggtcttgaactcctgacctcaagtgatccccccgacctcgccctgtcaaagtgttgggattacaggcatgagccaccccacctggcctcaaccctaactttcaagacaggcagaatgtgtggattaggttaaagaaacttcaggggtaccctgttcttttacactattaaaaggcatttttctgattgacagtagtttaaaagcttgaatgttgatagtcccaactgacataccactgtttcctaagcctatggaacagggaaatgcaaagtagggctgcctgcaaagtgagatgactgatgcccaggtggctcaagttgttgccagggaatgggctattatctccaggtgccccagtagttcagataattccacacagtcccaagttataaaatacagctgaacacagaacaaggaggttactctgtaaatggattgatcttacataaatgctttaagaccatctctgtctcaagaggttagaccagaaaatgaatgcccaaataccagcagaggcagtacttgtgtttgcaaatacataacagttaagagctcaggctccgatgccagatagacatgggttaaatcccagctcttccagcaaatagctgtgtggctatctctgttaagacattcttccgactatgtacagtagggctgattgcattccttaagatgagaatatgtggtagcttcagatgttagtgctttccttcctaaaactatgccctaatccctttggttggacctgtattttcctcaaaagcctcactcactgattttagggtagagctttctagctggctcatctcattcattatgctttgaatctctcaaatttccatctttgagaaaaacatatcttaaaactctggatggtcgaccggactttataactacagagaaaatgtaattttaactagaacatacaaaccacttagttatacaaaacttaaaattggtgctttctttaaaaatcacaaatgctatatgctggagacagtatggagacagctaagcctagcctatcagtaatgaatttagaacaaaagcagactgacacaaaagaggacaaaaggaggcatcctgcctgtgcttaccacctgattctctaagttcaggggtcttttgcacattataggagattttgtgatgtagtggaaaacagaggagaacaagttccatagagtcttcatttgtattagcttatcttagtgccccactgctaccatcctaatacaggcagtaaagactaagtcccaacaggtttctctgccttaggactctctccacttcctgacatcctgcacacagccaccaaactactttcctaaacccccagttccatcagataactttccagctcaaaaactttaatggctccctacctactacgcattgggaaaatcccaactaaaattcaagacccaggccagcattaccctactgttataatacaggacttgtgtccttctaattaccccaaggaaattctataaagcttcaaccagactaatcggctcactgctcccccaacacaaactgcccgcatatctaggctggattacgcccacgccagccctcactccaacctttctgccattccttccaaagccagcctacccccccatctctggccccacacactacccatactacccatcttctgaccctcatcaacacacccttgtagctatctcaattcccgtggcatcccaatccgctccaatcaagtcaaagttccttggaaggcagacacatactttacatagagggtccagcacagtgccctgcacttagtaggtgctggctattactgattaaaaccagcaggggttcaaataacgtttctagggagggcaagataatactgcctatcttcttccattcgtagtaaaaagtattcagcgttcactacaagcctgaaaacgcctagcgtacgcagatcaacggtgcagtggagagggcacgccgccggatggcaaaaaacctgtgtcctaatcctggttttgccacaatctcggcagttgctgggaaatcaagccatctctcggagctccggttgtctccgacgtaaaacaagggagctgctgtagaggatcccgaggtatcttttggctcctaaatgtcccccgataggaaaccccacactcgtcttccaaggcgggaggcaggcaaacttttttcccagcgcgggcattccacacggtcctggaaactcagtgcccggagaaaagggcagggctgagggcaaggtgagaagcggtccccccgaagtcgccggattcctttaccccacggctcgagtccgcctcaggttcccggccccctcacaggcggactccgggagagtgacgcggcgcggctcccaggtgcaggccgggtgactctgtccgcccctgcgccccccgcactagtggcacacgccccgtggccccgggtagcggccccggcccctcaccagcccaagggacgtccccgactctggaccaggcctctggctcccgcctggcgagccgctcttccgggccctggggcggcctcagcgcggcagtacgggccccaggccggcgggacgggcggcgtgaggggcagcggtggcggctttaagtgctgaatcaccactttgcaacccgagcgccaaaccgctgtgacccacggggcccgagggcccgggcgctccattccgcttacccacacaggcgctccggaggcggcaggcgggcgccgaggactgagcggaaggtgctgggcagtgcggggtgcagaagccacgctagccggtaccgcattagccagcgcagtcgccgggatcaccgcaaacgcttcctgcttgcgcttcgagccggccctgcgcactgcgcatgctctagccgcggcgccgcgcggtctcccgggagctgcggagaggtagctgctccgggttttgcctggagccggatggggccaggacgcaggcgaggacggtgaagaccgcggacagccgaggcctgagcaggcggactggagggacaggggtttggccggggcgctttaggagccagcacccagactttcccaggcggggagggtcccagctagatcccaccggccgcacttgtgagggtggcgacgtgtgtctgactgtgagggggcgaggggccgctcataaatccagtgagggcacacggggctatgttttctgaggcacccccactgactagcgtgccggaccctgcaggtgttggaacaaggttcgtggtcgcggcggcctcacgtaaaatgaatccgcggccggcgcgcggcccgcgggctccctctagagcgcggtggggacgtggaccgcgaaggcacagatgcgctggagacaaggctcgagtgcggcgtgggggaaattcagacgcaggggtcagcgatagagaggccaggacccagggggacgtttccatccttggggaagttagcagctctcttaagaggaaggtgcggatgggacgggcgccgcagcaaaacaaggcttcaaatccagagtagaaactactactcttgttagtactccgtactaggaatactactaatgtcagtcggcttcagtggttactttttaaacaaagaattttctccccagtggctttatggggctttgcacccacgaacaacttaatagttgttatgaatctaactttccataataccttatgggagtctttaaggaagaatgctattagggatggtgacttgccagcttaagtacttttaggtttctgattgacagacgatcaagactgcagccaaaaacggtgtccttagtccaagtattgctttaaatgggaattcagtaggagggttccttaatcaagttgatgctttatcgaagacgtacccacgatctttttaacagtgcggtttcacctaaaggcaaacctttggatgaaaacaggtaaaaattatggcaagcctcctagtggtgtttgcaagtgcatggttttaagaacctttaaattaccagtcccaatgcagagtagtcaatcaccttgaagcagctcctctgagagtgttaatgcagcctttctgaatacatttatgctccattaatggaatctataaatgggctggggtagattcagacttggagggcttgaaacatatacaatttgggggacctctttgagacataaaatacaaattataaatacaaaattagcaatcagaagattactatagagagaaaatacatcacaacaaatactcgagacttggagattagtacccttttttttcctgagatctctttaggctacttattagaaatgcttacataaaaatgcttccagatggccgggcgtggtggctcatgcctgtaatcccagcactttgggaggccaagccgggcggataacgagatcaggagttcgagaccagcctgaccaaaatggtgaaaccccgtgtctactaaaaatacaaaaattagccaggcgtggtggcatgcgtctgtaatcccagctactgaggaggctgaggcaggagaatcacttgaaccctggaggcggaggttgcagtgagccaagatcacgccactgcactccagcctgggcaacaaaatgagactctatgtctcaaaaaaaaaaaaaatgcttccagacaacaactggctttccctctacaactcccagtttggagcctgtgcaagtgagcagccctgaagtttaaacttcattagcttcatgataaatttccctctggttggagtagatgtcctggataagaaagattaatattaatatagtctcataactatcatctcaataaagaggaggtggatggaaagaaaagtaacaattttgagagtctactctgtgtctggcattgtacatggctccttcattagtcatcatgaccaccctctgtaatggatatttcctcacctaccagagatgaggaagctgtggcagagagaggttgagtaacttgccaacaattggacaaaaagagtggagttgtaatttgaacccaggactgtcttattccaaaacctgtgatttgctcatctcatttatgacttgacaaatatttgttgaatgccttacagataccaggtattataaaggtgctgggaatacagcagtggacaaaaaagacaaaagtttctgtcttgatggagattaccttctagctgtgtgggaaaaacagataataatcaagtgagtaagtgatatgaaggaacaggtggtcaggaaaggcctctttgaggaagtgacattcaggcagaccccagaatgatgagaaaaagtaggaaatgtgaaggtctagggtgtaatctttcccactctcactcaaacaagtataaggtgtaaaccacctagacaacttttttttcttttctttctttttttttttttgatggagtctcgctctgtcaccaggctggagtgcagtggcgcgatctcggctcactgcaacctccacctcccggattcatgtgattctcctgcctcagcctccagagtagctgggactactggcgcacgccaccatgcccagctaatttttgtatttttagtagagacgggatttcaccatgctggccaggatggtctcgatctcttgacctcatgatcccccctacctcagcttcccaaagcgctgggattataggcgtgagcctccatgcccggcctacaacttttttagaagcagaaaaagtaatgtgctgaagtcattctttgccttagataggaaaactagacacatattcaaatataagtattctgatatactggaagccaaatattagtgtttatctgtgctgtaagttccttccattagcccagatagaatagagttcaccatagagctgagtcaggagttcctaatgattgaaagaaaaaaacttaaaaaggaagcccagtggtgacagattggcgtttatttcctaattggtaatgttcagaaaaataatatcttttgtccccccagatgttttagcagaggaaagaaaaggaattttttttttttttttgaggcgaagttttgctcttgtcacccaggctggagtgcaatggcatgatcttggctcagcgcaacctccgcctcccaggttcaagcaaatctcctgcctcagcctcccaagtagctgggattacaggcatgcgccaccacacccagctaatttttgtgtttttagtagagacgggtttctccatgttgatcaggctggtctccaactcccaacctcaggtgacccgcctgtcttggcctcccaaagtgctgggattacaggcgtgagccaccgcgcccgggcaagaattttttttttttttttttttaaataggccgggtgcagtggctcacacctgtaatcccagctctttgggaggatgaggcaggtgaatcacttgaggtgaggagtttgagaccagcctggctaacatggtgaaaccctgtctctacagaaaaattaaaaaattagctgggcatgatggtgtgcacctgtgtcccagctacttgggaggctgaggcacaagaatcgcttgaacctgggaggcagaggttgcagtgagctgagatcgtgccactgcactccggcctaggttacagagtgagaccctgtctcgaaaataaaacttaaaatgtcttttgagactgggcacagtgactcacgcctgtaatcccagcactttgggaggccaaagtgggcggatcacctgaggttgggagttcgagaccagcctgaccaacagggagaaaacccgtctctactaaaaatacaaaattaactggacatggtggcgcatgcctgtaatcccagcactcggaaggctgaggcgggagaattgcttgaacccgggaggcggaggttgcggtgagccgagatgaagccattgcactccagcctggacaacgagtgaaactccatctcaaaaaaaaaaaatgtcttttgaactaatctagcctattgttatatattcaaaatcaaaatctgaattctgaatccaccaactcaaaattttgtacaaatagctaaagagaaagcatacctaggtagttaataacaaaggaaaatttaaagttagggccagacgcggtggcttatgcctgtaatcccaacaatttgggaggcagaggtgagagggtgcttgagctcaggagttcaagaccagctttggctacatagtcaggccttgtctatataaaaaaataaaaactaaattaggcagcaggtgcagtagctcatgcctgtaatgctagcactttgggaggccaaagcaggaggatcacttgagcttaggagttcgagaccagcctgggcaacatagacctcatctctatttaaaataaagataaaatcaaaacaaaacaaaaaattagccgggcatggtggtgcatgcctgcggtcccaactactctggatgttgaggtgtgaggatggcttgagcccaggaggtggaagttgcagtgagccaaaatcatgccactgcactccagcctgggcaagactgccagaccctgtctcaaacaacaattcttacaagaccttaaacatttttcataaacatcatttttatttgtattattttttaaggctcttgagcaatgccaattctttaatgaacagctgaggaacattggttttagccatcaattttctttttctcaaaagaaaaatgtctcaaaagacattttttttttaattgagacagagtctcactctgtcacccaggctggagtgcaatggtgtggtcttggctcactgcaacctctacctcccaggttcaagcgattctcctgcctcagcctcctgagtagctaggattataggcacctgccaccacgctcagctaatttttgtatttttagtagagacagggtttcaccatgttggccaggctggtctcaaactcctgacttcaggtgatccacccaccgcagcctcccgaagtgctggggttacaggcatgagccactgcacccggccttttttatctttttaaaacggggtctccctctgtggcccaggctggagtgcagtggagtgatctcagctcactgcaacctctgcctcccgggttcaagcgattctcctgcctcagcctcccaagtagctaggactacaggcatgagccaccacgccctgctgatttttttgtatttttagttgagactgggtttcaccatgttggccaagctggtctcgaacccctgacctcaggtgatctgcccacctcggcctcccaaagtgctgggattacaggcatgaaaaccaccgcacccagccttattttatgtgtcttaattttctcatttatctctctcactaacatgtaaataccacaagcatagaaacctggttgctcttttctctggtgtatcctcaacattgaaagcaagccctgggcccataatatttgttgaatgcataaatcaagagttgtcttaactgtgtgtggaaaatacgaattatagatcctgcccataaagtaactcaaatttacctttaaggactagcaaagatgagtcatttaggaaaactcctaacaaacaaatttataattaatcacttatctataaaacatttttaaaaattcatgttgcttttaggtattttattaccatagtattgtacttaaaactaatatacattttaaaactttttattgggaggggcacggtggctcacgcctgtaatcccagcacttggggaggctgaggcggatggctcacctaaggtcaggagttcgagaccagcctggccaatgtgatgaaaccctgactctactaaaaatacaaaaaattagccgggtacagtggcaggcgtttgtagtcccagctacccaggaggctgaggcaggagaattgcttgaacccaggaggcagaggttgcagtgagccaagatcatgccattgcactccagcctgggcaacaagagcaaaactctgtctcattaaaaaaaagaaaaaaagaaaaaaagctgggcatggtggctcacgcctgtaatcccagcactttgggaggccgaggtaggtggatcacctgaggtcgagagttggagaccagcctgaccaacatggagaagccccgtctctattaacacaaaattagccaggtgtggtggtgcatgcctgtaatcccagctactcaggaggctgaggcaggagaattgcttaaacctgggaggtggagagtgcagtgagctgagattgcgccattgcactccagcctgagcaacaagagcgaaactctgtctcaaaaagaaaaaaaaaaagaaaaaagagaaaactttgtattatggaacaagtagtcaaacataaacaaaataaaagaaaatagtataactattccaggcaaaatatgattttagaattctatagcccaataatgtcaacatagattttgtgatttaggataaaaacattttgaaaaatacgattttagaattccacagccaaacaatgtccataaataaataccccaggcatccattcattattcagcttccataattaccagttcatggccaatattgttctatcttttcctccaactccctcaacctccactaaattattctgaaccaaataccgggcatcatattattaatatttcatctcagtatttcagtatatgtctcaaaggacttaaagaaaatccacaggcactaacatacttaaaacattaagataattatttaatataatcaaatatgtagtcagtgttcccactttcctgagtgttcccactttcctgattgcctcaaatgtttctttttcacaatgggtttgttcaaatcaggatccaaacaagaacaaaacacttcatttaattaatatgtttcctttttttattttgttttgtatcttttgaagatgatcttttttgaagagtttattgaagtattgcaaacagaaaagtaaacaagtgataagtgtacagctcagtgaattttcaaaaactgaacacatccctgtaaacacacccagaagctctgccttattctccgtttcagtcactgtcaccccaagggtaaacactaacctgacttctaacacaataaattagttttgcctggattacagtttaatataaatgcactcatacagtatatactcttttgggtctggctttgtttaactatctggtgagatttatccatattttttagaataatttttgtttgttcactttcttttcttttctttcttttctttttttttttttttttttttttgagacagtctcactctgttgcccaggctggagtgcagtggcgtgatttcaactcactgcaacctctgcctttcaggtttaagtgattctcctgcctcagcctcccaagtagcttggattacaggggcccaccaccatgccctgctaatttttttttttttttttagtagagaccgggtttcacaatgttggtcaggctggtcttgaactcctgacctcagatgatcctcctgcctcagcctcccaaagttctgggattacagacatgagccaccgcgccggcctgtttgtttacttttttttttgagatgaagtctcactctgtcagcaggctggagtgcagtggtgcaatcttggctcactgcaacctccgattccctggtttaagcaattctgtctcaacctcccaagtagctgggattacaggcatgcgccacaatgcccagctaattttttgtatttttagtagagacggggttttcactgtgttagccaggatggtctcaatctcctgacctcaggtgatccacctgccttggcctcccaaagtgctgggattataggcgtgagccaccgtgcctggcccatagcttgtcaattctaaatcttttatttatttatttatttatttatttatttattttgtttgtttgtttgagacggagtcctgctctgtcacccaggctagagtgcagtggcagaatgtcggctcactgcaacctctgcctcccgtgttcaagagattctcctgcctcagcctcctgagtagctgggattacaagtgcatgccactatgcctggctaatttttgtatttttagtagagatggggtttcaccatattggtcaggctggtctcaatctcctgaccacacaatccatccggctcggcctcccaaagtgctgggattacaggcatgacccaccacgcctggccaatttttgtatttttttagtagagatggggtttcgccatgttggtcaagctggtcttaaactcctgacaggtgatccatctgccttggcctgccaaagtgctaggattacaggcgtgagccactgcacctggcctctccctcctcttttttattttgcaatttatttgtcaaaggagttgagtcatttatcctatagtgttcccaacattctaaattttgctgactgtattctttttatttttatttttttgagatggagtttcgctcttgctgcccaggagcaacaagaggagtgcaatggagtgacctcggctcactataacctccgcctcctgggttcaagtgattctcctgcctcagcctcctgagtagatgggattacaggcgtgcaccaccaagctcggctaatttttttgtattttttagtagagacggggtttcaccacgttgcccaggctggtcttgaactcctgacctcaagcgatccacccgcctcagtctcccaaagtgctgggattccaggcgtgagccagcgtgcccagcctgctgactgtattcttacaatgtgacttaacatgtttgtttcttatatttcctgtaaatggtagttacatccaccgatttgatcagattcagcaaatatgcatttgagaagtgtttactaagcactgtgcttgctgctaggtgggatacaaaaatgactaagacatcactcctaatctattgtttattatgaatatgaaaggttaaggccaggcgtggtggctcacacctgtaatcccagcactttgggaggctgaggcagctggatcacttgaggccaggagttggagaccagactggccaacaatgcaaaatcccgtctctactaaaaatacaaaaagtagcggctgggcgcggtggctcacacctgtaatcccagcactttgggaagctgagacaggcggatcacctgagatcaggagttcgagaccagcctgaccaacatggagaaacccccgtctctactaaaaatacaaaattagccgggtgtggtggtgcaggcctgtaatcctagctactcggaaggctgaggcaggagaatcacttaaacctgggaggtggaggttgcagtgagctgagattgcacccttgcactccagcctgggcaacaagagcaaaactctgtctcaaaaaaaaaaaaaaaaaaaactaaaaatacaaaaagcagccgggtttggtggtgcacacctgtagtcctagctacttgggacactgaggcagaagactcccttgaatccgggaggcaaaggctgcagtgagccgagatcatgccactacaccccagcctgggtgacagagtgagaccctgtctgcctgtttttttgtttgtttgttttgtttttgttttttctgagactgagttttgctcttgttgcccaggctggagtgcaatgccatgatctcggctcacggcaacttctgcctcccagattcaagcagttctcccgcctcagccttccaagtaactgagattacaggcatgtgccaccatgcccagttaattttgtatttttagtagagacagagtttctccatgttggtcaggctggtcttgaactcccgacctcaggcgatctgccagcctcggcctcccaaagtgctgggattacaactgtgagccaccatgcctggcagggcaggactttttaaattcatttttgtgactatcacagggtatgcacctaagctcagtaaacatttgttgagtaattaaaaccagctaaaggtgtttttgttttttgttttttttgagacggagtcttgctctgtcacccaggctggagtgtagtggtgcaatctcagctcactacaagctccgcctcccgggttcatgccattctcctgcctcagcctcccaagtagctgggactacaggcgcccgccaccacacccagctaattttttttgtacttttagtagagatggggtttcaccgtgttagccaggatggtctcgatctcctgacctcgtgatccacctgcctcggcctcccaaagtgctgggattacaggcccgagccaccgctcctggcccccattttttttttcaagataagatcttgctctgtcacccaggctggagtgcactggtatgataatgactcactgcagcctcacctcccaggctcaagtgatcctcccagctcagcctcccgagtagttgggaccacaggtgagtgccaccatggctgagactattttcattttttgtagagatgaggtctggagagtcttggaagaattcttacgttaaataaaaattcaggatgcaaaattctatatccaggttgagcatagtggcttacccctgtaatcccagcacttaaggaggtagaggcagaatgatagtttgagtccacgatagtttgagtccaggagttcaagacctgcctgggcaacatagtgagactctgttctccataaaaagggggggaaagaccaaaaaaaccctatatattcaattatgatctcaattactgaaaatatacaaatagacaactggaaagaaatacatcaaaatattaatggtagtaattgctgggtggtagaaatctgctatctctatacaggagttccagaaagaaacaacagacgtggcaagtgaaatagtcaatgaataattcaaaaacatttcccagactgaaggtaacaacttgccagactgtggctcagcccaattaatgaaagtagatgcacacattggctgggcatggtggctcacacctgtaatcccagcactttgggaggccaaggcgggcggaccatgaggtcaggagatcgagaccatcctggttaacatggtgaaaccccgtctttactaaaaacacaaaaaattagccgggcgtggtggcgggcgcctgtagtctcagctactccggaggctgaggcaggagaatagcgtgaacccaggaggcggagctttcagtgagccaagattgcgccactgcacccagcctgggcgacagtgtgagactccgtgtcaaaaaaaaaaaaaagaaagaaagaaagtagatgcacaccaaggcacatcattgcaagatttcttttttttgttttttgtttttttttgagacagcatctcactctgttgccccagctagagtacagtggcacgatctcagctcactgcaacctccacctcccgggttcaagcgattctcctgcctcagcctcccaagtagctgggactacaggcacgcgccaccatgcccggctaatttttgtatttatagtagagatggggtttcaccatattggccaggctggtctcgaactcctgacctcgtgatccacccacctcagcctcccaaagtgctgggattacaggcgtgagccaccatgcccagctgcaagatttctttctttttttcttttctttttttttttttttttttttttttttttgagacggagtcttgctctgtcacccaggctggagtgcagtggtgcaatctcggctcactgtaacctccacctcccaggttcaagcgattgtcatgcctcagcctccaagtagcttggattacagacgtgcatcaccacgcccagctaatttttatatttttagtagagacacggtttcaccatgttggccaggctggtctcaaactcccaacttcaggtgatccacctgcctcgggctcccaaagtgctgggattacagacatgagccgccacaccccgcctcattgcaaaatttctagtcactagaatgaaatgctcagctatgaacagacataatgacctgaatacagataattgatttaaccagaaattgtaatattgggtattagagaaggaaatgcagagaggatggtaaagtttgagaactaaacctcacctaccataagatgtcaataaataatgtctaaaatggattaatcaaaagataacggtataggtctggcacaggggtggctcatgcctataatcctagcactttggaaggctgaggcggaggattgcttgagtccagcagcttgagaccagcctgggtaacaaagcaataccctgtgtctatgaacaactttaaaaattactgggtgtggtggtgtgtgcctgtagtcccaggtactcatgaggctgaggcagtaagatcacttcaactgatgcagttgaggctattcaggaggtggaagtggactgctggaacccaggaggtcaagggccaggcgcggtggctcatgcctgtaattccagcactttgggaggccaaggtgggggaatcacttgagcccaggagttcaagaccagcctggacaacaaagtgagaccctgtctctacaaaaaatagaaaaaaatttgccaggtgtagtggcatgtgcctgtggccccagctactcaggaggctgaggcaataggattgcttcaatgggagcagttgaggctgcagtgatacctgatagagccactgcactctagcctaggcaacagagtgagaccctgtctcaaaaaaataataaataaataaataaatacaaataacagtatatacaaattccttatgaaaatagaaatgtgtaaatgccagcaaaaacaactaaagtggttggttgtttctggggtaaaggtctagaggcattggtgtggaataaggctgagaaaatactttttttgttgttgttgttacaagccttttagaactatttaactttataaaacatttccacgtttttcttttcttttcctttctttcctttctttctttctttcttttttttttttttgagacaaagtcatactctgtcacccaggctggagtgcagtggcatgctcttggctcactgcaacttctgcctcccaggttcaggcagttctcctgcctggtattacaggtatgagctgccatgcccagcctccatgtttttctttaagaaaaataaaaatcaatttaaaatagtttattcgagaagtacatatactcctgaaagagaaatgccagagcaaacacgtgggcaacgatgttgcattgttagaattcagtttaactagacttaaattattattattattattgagacggagtcttgctgtgtcgccaggctggtgtgtagtggcgtgatctcggctcactgcagcctctgcctcccaagttcaagtgattctcctgcctcagtctcccgagtagctgggaccactggcacacgccaccatgctaaatttttttttttttttttttgtatttttagtagagacaaggtttcaccatattggctaggatggtctcaaactcctgacctggtgatctgcccatcttggccttccaaagtgctgggattacaggtgtgagccaccacacccggccccagctaatttgtttgttttgagatggaacctcgctctgttgcccaggctggagtgcaatggtgtgatcttggctcactgcaacctccacctccagggttcaagcgattctcctgcctcagcctcccaagtagctgggattacagtcacgtgccatcacacccagctaatttttgtatttttagtagagatggggtttcgccatgttggccaggatggtctcgaacccctgacctcaggtgatctacctgccttggcctcccaaagtgctgggattacgggcgtaagcctccgtgcccagccgagaaatgttgattattaggctgagtagtttgaactcaacaaaggcaatgtaaaatgacatttcagggactgcttagtgcaacaaaacacttacatggggccattagaccctaactatctctattagacttagccctgagggcaagtacaataattcagcctgtatattcactgccaggcccacagtaagcatttcaagaagagtatgagaaaagtggatgtgaccaggcatggtggctcatgcctgtaatctcagcactttgggaggctgaggtgggtggatcacgaggtcaggagttcgagaccatcctggccaacatggcgaaacctcgtctctactaaaaatacaaaaattagctgggtgtggtagcgcgtgcctgtaaacccagctattcagaggctgaggcatgagaattgcttgaacccgggaggcagaggttgcagtgagccaagattgtgccactgtactccagcctggcgacacagcagtactccatctcaattaaaaaaaaaaaaaagaatacatgtgcacttagcaaatgaaaaaaactcaatgggaaagacagtagttaagaacctgggagttggaatgggaaagaattctaagttccttccctaatagttaaccttatactatgattaaagtgtaagtacagtgatatgctgtatgactacagacaaacttatttggctagtttactgataaaatagtagaaaataatagttcctacttcacaaagttgttctgaagattaaatgagatgatacacacaaagcctttagcatggagtctgactcacagtaaaccctaggtaaatggtagctgtatctattatcaaatggagactcttgaatttcttgcgtcaacccatgtgactgttaacatatatattgtttgaatatttgctaaagagaaaggaaagacggcccagcagggtagcttatgcctataattccagcagtttaggaggctgaggtgggaggattacttgagaccaggagttcaagaccagcctgggcagcatagggagacccccatatctaccaaaggaaaaaaaaattagccaggtctggtggcttgtgcctatagtcccagctactcaggaggctgagatgggaggatcccttgagcccaggaggtccaggcttcagtgagccgtgatggtgtattgtactccagccttggtgatagagcaagaccctgactcaaaaaaaaaaaaagaaagaaaaggggattttttttttttttgagacagagtctagctctgtcacccaggctggagtccagtggtgccatctcggctcactgcaacctctacctcctgggttgaagcgattctcctgcttcagcctcctgaatagctgggactataggcgccctccaccacacctggctaattttttttgtatttttagtagagacggggttttaccatatttattggccaaactggtcttgaattcctgaccttatgatctgcccatctcggcctcccaaagtgctgggattaaaggcatgagccaccgtgcccagccagtgtactttatatgtatcccaggtactttatatgttattttaatcctcacaataatagtaattattattatctccattttacagataaggaaaccaaggctgatagaggtgaagtaatttccttcaggtactcaatatatatttattgagtaaagccttactttggtgtaaggcttgttcaagacactgggaaaataatactgaacaaaaagacagggtccctaatgaaacttacattctatccagggagacacacaatatattgacaatataatatattgtcaatacacacaatatattgcctgtagtgttatgaagaaaatagacagggttctgagatagaaggttataagaggaaggccaggtgcagtggctcacatctgtaattccagcactttgggaggccaaggagggcagattacttgaggccaggagttcgagactagcctggccaacatggtgaaaccgagtctctattaaaaatataaaaaaaaattagccgggcgtggtggggcacttgtaatcccacctattcaggaggctgaggcacaagaattgcttgaacccaggaggcggaggttgcggtgagccgagatcccgccactgcacttcagcatgggggaccaggacaagactccgtctcaaaaaaaaaaaaagaaaattatgaagaatgtgctttagatagggtggtcagaagaggtgtttttaaaagaaaaagttcaactgagagctgaagaatgagatgggtaagccatgcaaagagccaaacagagttcagggcagagggtacgtcaggtacaagggcctggccacaggaaaaagctaggagctctgaagcatggtaatgagatttttggaaagtgcctttagttggtggtatggacaagggccagatcatgaggaccctacagagcatggtaatgagtttggatttaattccaaatacaaatgagaaggtaatgtaagattaaaaagcagatgaagagcataatcttattttcttatttcttaaaagacacttcccttgctgagtaaatgtagtggaggagttgggggtaggagaaaagggcagaagagaaacttgttaaggaggtagatgacatttgttcagggaagagataagagccttgtactagggtgatcatcggaggggagataaaatcaacaggactccactacacgtggaggaatcaaaggttctggttagcaccagtatccagatgagaaaagattagggtggagataggtcccattttgaaatgccagcgagccacctaagaggagatatcaatagacagctggctactcaaaatagagatgaccagcagaaggagctgtagatgcagttatttccttggggcgggttgtgcgggggggcgcatgtaggggattagcaagtggaggaacacaaaaaggacatcagagctttccactacaccgggttgttacttaatagactaacacgacatttaggttcccatgggttgtgtgggccagaagcgcagttccaggaaccgactacaacatagtgtgggatatgatgtttctcttcaaataacccgatcaatcttttattctttaattcatagtaccctcccttttttctctttttctccttttttgcttttgttaaatgcccaggcacgccacaatactaggccttatcaataccagctcacattcctttccttatttgaagggactaactttttagctcattacagacaccccttcccctttcctgtccgctttcttttaagtacccaccttagctaaaaaaaatcaaatgtttagccaaccgggattagtttagattatacgacccgaccccagccaatgggaaaaagatacaggggcaggacttgcgtcaaaaatagactcctgcccctttgttcaggtgtgctctcaaggcgactggccaaaaaggcacccctctgcgcaaaaataaaattgctttgctaaaaatcctttgttcaagtgttcaatttccttaagattttaaaagttattcataacaataggctcctgtttcagtatttcctggtgcggcgtaccacacctacagcggtcgagtcacgccaggcactgccaagacgccgaaaagttctcccgcagcaggccggaggtgaccgacggcgcgcaggccccagcgagcgctgcatgctgggatccgtaggccggggcggcggatgtttgcgcagcttccttgagatgccaccgcccgctgcgccgcgcagaaacggggagcgcagcgcacccgcggcctgcgtcactcggtcagtgcagtcgttctaaaatcgaggcggaccctgctttcttgcctggagtcacttagagatgatgactaaaggataaattcagagtcctccaaatggcgtccagtgtccatttcatcacgatttggaacctgtagtagccttatcgcttaacacttcctaattattattattattattttctttttgagaaagggcattgctctgtcgcctatgctggagtaatccagcgacataatcccggctcactgcagcctctatctcccgtgttcagcgatccttcttcctcagcatcccgagtagatgggaccaaaaggcacgcatcaccacaccaggctattttttcccctctattttttgttgagacccgttgggaggcgcggggaggggggtctccctatgtcgcccagactggtctcaaactcctggaacttaagttatcgtcctacctcggcccgttaaagtgttgggattacaggcctgagccaccgggccccaacattaattattcttcaagcctattctggaccgggcgcggtggctcacgcctgtaatcccagcactttgggaggccgaggcgggtggatcatctgaggtcaggagttcgagaccagcctggccaacatggtgaaaccacatctctactgaaaatacaaatattagccgggcgtggtggcacgcacctgtaatcccagctactcgggggctgaagcagcagaatcgcttgaacctgcgaggcggaggttgcaatgagccgagatcgcgccactgcactccagcctgggtgacaagagcaagactccgtctctcacacacacacacacacacacacacacacaaagactattctggtctctgcctccgggatggcggctcgctttggacctctcttctgtgcttctactgccctctcttacaattctctaataattataatcatggcgagtgcttaccatatattccaatctatttacttccacaagctcattaattctcaccctaaccctctgagatggttactattatttcctctctgcagctgagggaattttgggctagggacgttatgtaagttgagccacgctacgctaaaagttccacactcaattctagcgtctcggctctggactaccaagttccggagcaagcagacagaccacctctttacgttcccgtaggccacgctccgggggcggggctccagtgaggatactgcatcccatggtgccttgcgcgccagcgcagccattggtccggctactctgtctctttttcaaattgaggcgccgagtcgttgcttagtttctggggattcgggcggagacgagattagtgatttggcggctccgactggcgcgggacaaacgccacggccagagtaccgggtagagagcggggacgccgacctgcgtgcgtcggtcctccaggccacgccagcgcccgagagggaccagggagactccggcccctgtcggccgccaagcccctccgcccctcacagcgcccaggtccgcggccgggccttgattttttggcggggaccgtcatggcgtcgcagccaaattcgtctgcgaagaagaaagaggagaaggggaagaacatccaggtggtggtgagatgcaggtagggagagggctgacaggattccgagcgctgcggcttcgctgctgggccccctactgcgcggtccagggagagggattttatttgcatttcctgagggtcccagtttcttggttctccgcgttctgttcaataaaaatgacacccggttgctgtgtgtatgtggtttttaggagaaaataacatgtttgatttgatcactgttccatactgaaaagtgcgttcttatgtttaaactatagtcaataaagatgtaggtgtcacttttatatgctacttcatgtagtttgtcagtttggaagtaagactgaatacctattttgcagatggttaagcacttacgttggtattattacctctaaaaagcaatcaatcactgttctctttattctagatgcaatattttctgcatccctactaaacaagtaaacatctctgtctttaaacattaaaaattaataaagtgagtttatgttttttaaaagatcaagacaagttaagctagtgtaaatttctgattgtgctgcagttttccctttcatctgcgtgtttgttcatagaccaaactaaacggatatttcgagataaagggatgtggaggggtgttcggccctcccctgactggtttccaaataacttcccaattttaaaataagctagaaactgctgcttagttagaattgatttattcaactttttagaggctctccacagtttactgagtatgtgtgttttgtgtgtccgtttttgtggctgttaacagttgctgttgcaacttttctgtaaaccccaaagtattctaaaattaaaaggttattttttagaaaaacttgtatcaacaaactttcttaggctattgtttactcagccctggtaacttgaattgtggatatcgaaggtgatgactaggtttctaaacaaggtgtcagagaggaaattgggtggcaatcttaagtctagccagtgacacttactagttgttgtactctggggcttctgttagtagttagttgtttgaagatttttatttaaaaatgcagtgcatataacaagtgcaaattttaaaattattttggttgtttaataaaaccaggcaatattaccttttccgtatgcatttatttaatttcttttttaatgttagttacaaaatatttcagacttacaaaaagttattaagaacaatgtaataaacatttgtatattcatcacccagattaagaaacaaaacaatcattgctggagccccccttttccctctccatcccttttcctccagccactgttaaccattatcttgaacttgatgtttatgatccgtatacatttcaagtcttagaagagatttactttatcaccaatgaatagaatagttctttgcttgtgtctaatatttacaataatttttgtgtaaagagattttttttttcagattagcctttttctttcaaatagccttcctggtgcgtctgtcattaagcattaagctttagtaaataggcaacttatgagttgcgaggtcctcaggggttggtaagccttttctgtaaagggcccagagaaataaatatttattttatttaaatactttaggctttgcagatcacatgtggtttatcagttttttttgagacggagtctcgctctcttaggccgtagtgcagtggtgcaatctcagctcactgcaacctccgcctcccggattcaagcaattttcccacttcagcctctcaggtagctgggattacaggcgcacaccgccatgcctggctaatttttgtatttttagtagagatggggtttcaccatgttggccaggctggtctcgaactcctgacctcagagaatccacccaccttggcctcccaaagtgctgggattataggcgtgagctactgtacccctttacatgtggtttctgtcacattattttctgatctttttttttttaagaacactttaaaactgtaaaaatcattcttaaatctgtcagggcaggggccaggtttgacccacaggttaaagtttacagatccctacataatgcgctactggttctctttcttatgtccctcctattccatcccctatttttttcccaatttaaaaagtcattttcaaacacacataatataaaatttaacatcttaaccacttttaagtgtacagttcagtgatattaaatacataatattctgcaacaattactaccatccatctccataactcttttcatcatgaaaaactgaaactctatacacattaaacaataactccccatttccctctcccatcaacccgacacctaccattcgactgtcttatgattttgactactctaagtacttcataaagtggagtcataatacagtatttatccttttgtgacttgctcattccacttaggcataatgtcctccaggttggaccatgttgtagcaaatgtcagggttttcttcctttttaaggctgcatagtatttattatatgtatataccacattttgcttgtcccttcatatgtcaatggatacttgagttacttctttttttgttgttgttgtttttgagaccgagtctcgctctgttgcccaggctggagtgcagtggcgcggtcttggctcacactgcaagctccatctcccgggttcacgccattctcctgcctcagcctcccaaggagctgggactacaggcgcctgccatctctcccggctaattttttgtatttttagtagagacggggtttcaccatattagccaggatggtctccatctcctgaccttgtgatctgcccgccttggcctccctaagagccgggattacaggcgtgagctacggagcccggccttgagttacttcttacttttagctattatgaataatgttgctatgaatatgggttttcaattcttttgggtatttacccagaattgtaattgctggatcatatgataattctattttaaagtttttgaggaaccgacaaactattttccacagtggctggaccattttacattcctaccaacagtgcataagggttccaatttctccacatcctcaccaacgtttattttctgtttcttttttttttttcaagtagccatccattgggtgtgaggtgctatctcattgtagttttgatttgtatttccctaatgattaatgatgttgagcatcttttcatgtgtttactggccattttgtgtatctttggagaaatgtctgtttaagtcctttgcccatttttaaattggtttgcttttttgttgttgagttttaggaattttctatatattttggatattttcagatacataaacggcaaaaattttttccccattactgtggtttgcctttttactcattgataccgtgtggtcttttcctttctttttctttttggaaccagtgcatggcctctttgttgattctgtgtttggccccagtgcagcctgttctgtgctatgtgtctgcagtgctgaaaccaggcctacccagcaccatacagaagtccaggctgtagataccaatgcatgggtcacatttgatacccaaatctgtgtgttcctggatctccaaaccaaagtttccagtatctgagaagttgttctttcttgattcacactcctgcatctttagacctttcttcagggtttcttctgctttggccctttgtgcagtgggtggcaatcttcacttctcctgatgccaaaggatctgacaatgtatttgactttggagaacacaggggtctggcctatgagctgctccaacaccttggctgctggggtcagtcatctccagtctcctccatacagatgttgagacagaaaatcgttctgtcacccaggctggagtgcagtggcacagtctcggctcactgtaacctctgcctgtcaggttcaagcaattcttatgcttcagcctcccaagtatctgggattacaggtgtgcaccaccatgcctggctaattttttgtatttttagtagagatggggtttcgccttgttggccaggctggtcttgaactactggcctcaagtgatccacccattttggcctcccaaagtgctgggattatgagtgtgagccctcatctggccagagttctcttttttttaccttgatcttgcactatgatggagaaaaggaagataaagtctttttttttcccttgggtttgtttgtttgtttgtttgtttgttttttgagacggaattttgctctcgttgcctaggctggagtgcattggtacgatcttggcttactgcaacctccgcctcctgggttcaagccattttcctgcctcagcctctagagtagctgggattacaggcatgcgccaccacgcctggctaattttgtatttttagtagagatggggtttcaccatgttggtcaggctggtcttgatctcctgatctcaggtgatccgtccaccctggcctcccaaagtactgggattacaggcgtgagcccgtgcctgggctattttttttttctcccctttaaatatagtatcttgctttattgcccagacttgttgtgaactcctggactcaaatagtcctcctacctcagccttccaggtagctgggatcacagggatgctgtcttttgatacacaaacattttaaatttttatgaagtccagtttgtctttttgtttttgttccctgtatctttggtgttatatccaagaaatcattgccaaatccattgttgtgaagcttttgccttatgttttcttctaagagttttatagctttaggtcttacatacatttttgatccattttgagttaatatttgtatattgtgttagataagggtccaacctcattcttttgcatatggatatttagtttcccagcaccatttggtgaaaagcttgtctttttctgattgaatggtcttggcaaccttattaaaaatcatttgctcatatgtaagagggcttatttctaagtgctgttatgttccattggtctataagtctgtctttatgtcagtaccacatggttttgattattgcagctttgtagtaagttttgaaatcaggaagtgtgagtcctccagctttgttctttttcaagattgttttggctatctggactcccttgggattccatatgaatttgaggatgaatttttctatttttgtaaaacacgtcattgggattttaatagggattacattgaatctatagatcactttgggtagtattggcatcttaacaatattaagtctttcagttcatgaacaagggatgtgtttccatttatttatgccccttaatttctgccagcagtttttttttgtttgtttttgttttgagatggagtttcgctcttgttgtccaggctggagtgcagtggcacaatcttagctcattgcaacctccacctcccgagttcaagtgattctcctgcctcagcctcctgagtagctgggattacaggtatgtggcaccacgaccagctaatttttgtatttttactagagacaaagtttcaccatgttggtcaggctggtcacgaactcttgacctcaggtgatccacccaccttggcctcccaaagtgctgggattataggcgtgagccactgcgcctggcctcagcagtgttttatagttttcattttataagtctttcacctccttggttaaattaattactaatattttattctttttggtgctattttaaattgagttgtttttgtaatttcctttttagattgttcattcttagtgtataaaaatgtaactggaggctggacgcagtggctctcacctgttatcccagcactttgggaggcaaggtgggcctcccaactcctgatcacgagatcaggagttcaaggccagcctggccaacatagtgaaaccctgtctctactaaaaatacaaaaattagccatgcatcgtggcgcgtgcctgtagtcccagctacttaggaggctgaggcaggagaatcgcttgaacctggaaggtggaggttgtggtgagccaagatcgtgccactgtactccagcctgggcaacagagtgagactctgtctcaaaaaaaaaaaaaaagaaaaaagaaacgtcgctggattttgcttgttgactttctatccagctactttgctgaattcacttattagttctaacagtttttttttgtgtgtgtgtaattttagagttttcttttctttttttttttttgagatggagtctcgctttgttgccaggctggagtgcagtggcgcgatctcggctcactgcaacctctacctcccaggttcaagcaattctcctgcctcagcctcccgagtagctgggactacaggcacacgctacgacgcccagctaatttttgtatttttagtagagacggggtttcaccatgttggccaggatggtctcgatctcttgacctcgtgatccacctgcctcagcctcccaaagttctgggattacagccgtgagccactgtgcctggcttttttttttttttaattaactattgaacttctgtttattattattattattatttatttatttattattttttgagatgaaatctcggtctgttgcccaggcgggagtgcagtggtgtgatctcggctcactgcaacctccgcctcccgggttcaagcaattctgtgcctcagcctccggagtagctgggattataggcgctcgccaccatgcccggccaatttttgtatttttagtagagatagggtttcatcatgttggtcaggctggtcttgaactcctgacctcgtgatccgcccgcttcggcctcccaaagtgttgggattacaggcgtgagccactgcacttggccttatttttattatttttttcatcaacttttaagttctggggtacatgtgcatgatgtgcaggtttatcacataggtaaacctgtgccatcacagtttgctgcacagatcaacccatcacctagctattaagcccagcatccactagctattcttcttgatgctctagctccttttgccccactgaattttagggttttctttcttttctatttttttttcttttgagacagactctcgctctgtcaccaggctggagtgcagtggcacaatcttggctcattgcaacctctgcctcctgggttcaagcgattctcctgcctcagcctcccgagtagctgggactacaggcatgcgcccatgcctagctaagtttttgtagttttagtagagacagggtttcactatgttggcaaggctggtctcaaactcctgacctcaagtccccttggggttcctgaagtactgggattataggtgtgagccaccacgcccggccagattttctatataaaagatcatataatctgcagacagataattttactttttccttttctttctttttttctttttttgagatggagtctcgctctgtcgcccaggctggagcgcggtggcgccatctctgcttactgttacctctgcctcctgggttcaagcagttctctgcctcagcctcccaagtagctgggattacatgcacatgccaccacgcccagctaatttttgtatttttagtagagatgggagttcatcatcttggctaggctggtcttgaactcctgacctcgtgatccatccgccttggcctcccaaagtgctgggattacaggcatgagccaccgctcttggccctcaaccttttccttttcaatttggatgccttttatttttatttttcttccttttttttttgagatggagtctcgctctgttgcccaggctggaatgcagtggtgcaatctctgctcactgcaacctacgcctcctgggttcaaacgattctcctgcctcagccttccgagtagcttgtactacaggcatgtgccaccataaacagctaattttttttttttctcgtatttttagtagagacggggtttcgccgttttagccaggctggtctcgatctcctgacctcgcgatccgcctgcctcagccttccaaagtgctgggattacaggcgtgagccaccatgcccggcccttgtttttctttcttgcctaattactctagctagaacttacagtattatgtcgaatggaagtggcaaaagtgggcattgggcatccttgtcttgctcctgttcttttatttgttagtttgtttgagatcctcctgcctcagtttcctgagtagctgggactatagacacactactacacccagctaattaaaaaaataattttttttttttttttagagatggggtctcgctatgtttcccatgctgatcctgaactcctggcttcgggtgatcctctactcttaccctcccatagtgctgtgattacaggcatgaaccactgtgctggccctgttcttgtttttagaggaacattcttcagtctttgaccatcaattatgtttgctgtgggtttttcatatgttgcttttattttgttgaggtagtttcactctattcctagtttgttgagcatttttatgactaatgggttttgaattttgtcacatgcttttcctgcatcgattgacatgattctgtggtttccttcattctgttaatgtggtatattacattgatcaatttttacatgttggaccatccctgtattccaggaataaatcccacttggtcatggtgtataatccttgtgctgctcagttcaatgtgttggtattttgttgaggatttttttttatcagtgttcataagggatagtgatctgtagttttcttgtagttgcctttgtctggctttggtatcagggtaatgcttgcctcacaaaatgagttgggaagtgttctctcctttgccagattttttctgggaaaagattgagaagaactggtattagatcttcttgaaatgttttatagaattcacctatgaaactatcagatctagggcttttctttgtcaggagatttttggttagtgagtccatctctttactggttatagctccattcagaatttccatttctttgtgatttagtctttgtaagtattgtgtttctaggaatttgttcagctgggttatccgatttgttggcatacaattgttgaaaatactctttcaacaataagagagaagacacaaataactagttcttttgtttccagttccttaagttgtaaagttagggtgttgatatgagatctttcttgctttttaatgtaagcattcatagctataaatttcccccttagcactgcttttgctgtgtcccgtaagttttggtatgttgtattttcattttcattaatctctaaaattttctaattttccttgtgatgtctttgaaccctggttacttaaacacacacacacacacacgtgtgtgtgtgtgtgtgtgtgtgtgtgtgtggttttttgtttgttttgagactgagtttcgctcttgttgcccaggctggggtgcaatggcgcgatctcggctcactgcaacctctgcctcccggttcaagcgattctcctgtctcagcctccagagtagctgggattacaggcgcctgccaccacgcctggctaatttcacacacacatttaaaaaatacatctacctgcttttacttcagaatctttgcaatttctgttctctctgcctgaaaattttttccaccaaaatatctacagggcctggctcccttgctttttaggttctgcttaaatatcacctgcgtagaagcattccctaactaccctaaaatagcaaccaactatcttccaccctcaacacttcctatcccccttaaactgctttcttttcttttctttttttttttttttttttgagacagagtctcgctctgttgcccaggcctggagtgcagtggcgcattcttggctcaccgcaacctccacttcagcctcccaagtagctgggactgtaggtggctgccaccatgcctggctaatttttttttttttgagatggagtctcactctttcacccaggctggagtgtagtggcacagtctcggctcactgcagcctccatctcccaggttcaagtgatttctggctaatttttgtatttttagtagagatgaggtttcaccatattggccagggctagtttcgaacttctgacctcaagtgatctgcccaccttggcctcccaaagtgctaggattacaggtgtgagccactgtgcctggcctaatttttgtatttttaatagtgatgggtttttactatgttggccaggctgatctcaaactcctgacctcaagtgattcacccacctcagcttcccaaagtgctgagattacaggcgtgagccactgtgcctggcctgctttattttcatttctaatttatcagcatctaatatatttattcattttatagtcatctcttccttcaactaagttaaaagctccctgagcacaggattttggtgtttttttctttcctttaactttgtattgttcattgctgtatctccagtgtctagaaaattacctatcacatagtaagtacttgatgaatatttgtggaatgagttaatttagcacttctccacaggataggacttaggtttttttaatcctcaatctcccttccctcaccattttgattgtttgaatttttatataactatggtgaagccaacaaattgatggatttgttagtgtgagcagccgaaactttgcaatttctaataagttagagaagtctgggtaggaaactaatgacttggcagtactctttcttagagtacacatagtccctaaagcttctctgagaattttgataactttgaggaatgtgtgatctgtatgaatttcctatcacttagtcctgacaatgtgaatggtattcatttggtaacttaattttatacgtccaggcaagatactagtttaggggatgccaaaaataatagactaattggaaaagctttagccacatgagagcaattcactccacttgatgctcttggcctacctcagtataagttggttctaccttagttttgttgaagttttaataatactgtacattcatgttggttatatgcattgtgtaagttttagtatagttggcaaatgaaagcattaccagatactacctgggagttaagtttcctaggatcacagatttggtcttctgatcacttggaagtatacttagagtgggctgtgccaggggaagttgaggtatccttcttaaataagtagcaacttggtttatctagtgataagggggaaataatttcctgtttggcactttctccaaaatatatgatactcaatgggaaaaatgaactcaggtcaagattatgtctctccctttggcccagacatgtattgagtatataattgtcttattgatgctactctgtggactgtgatattagttttcccataattcctcttaggatgacatttattaggcaatgtagtttaacagatatttaagaacctactgtgtgctaagcatggtagttgttgctggggaaacagtaaactagacagtatttctttctgtagtgatctgaggtttagtgggtaacacattaaaaaaaaaagataagagaggtgatgtttagaaaaggtgtataaagggtgctgtaggaatatatagcagacatttaatgtggtcttggttggagcaggtgggggaggcacataggatagaaaggacttcctgaggaaataatcatttcaactaaatacctactcaggcatttccgtagaatgaggactcttgatccagtcggcagtgtagaccttctgtgtctattcactcatttaaaaatggggctaataatattaccaacctcacagtgttgtgtggacaaactgagtgagcacaatgcaaagcacttgaaacaataagtacctggcacatagtaagtactcaacttattagtcattatttttatgtactttttattttgtgccaggtatctactggcagattagtattttgaacacaaatttgacatgtttttttctactacatcataacctaatttgatcggatttttttttttttttttttttgagacggagtttcgctcttgttgcccaggctggagtgcaatggcgcgatcttggctcaccgcaacctccacctcccaggttcaagcaattctcctgcctcagcctcccgagtagcagggattacaggcatgcaccaccatgcccagctacttttgtatttttaatagagacagagtttctgcatgttggtcaggctggtctcgaactcccgacctcaggtgatccgcctgcctcggcctcccaaagtgctgggattacaggcgtgagccactgcgcccagccttgatcagattttaagaataggagaaatggaattctgaaaaataagtttggcatttttacaagttaaaacctgttagtggctgggcacagtgtctcacttctgtaatactagcaccttgggaagctgaggtgggataatcacttgagcccggaagtttgagaccagcctgtgcaacacagcaagaccccatctctaccatcaaaacaaaacaaatctattcgtatctgctctaagaagctgccagaattgtaatgtcttaacatatctttgaacatttaaaaaattatatttgtgaaacttgagacacttataattttactgtctgctttagcaatatcacttagtcctgatttaatctccatcaccaacaatgtggtcaaaatttcgcatttttcttgacaaatgtagttagtgaaaatgtcattgataacctgagaactaagagctcttgaatgactttgtgtatttctttttatagaccatttaatttggcagagcggaaagctagcgcccattcaatagtagaatgtgatcctgtacgaaaagaagttagtgtacgaactggaggattggctgacaagagctcaaggaaaacatacacttttgatatggtaacatatggtgcaatttctttattatccactaatgtaaaataattttaatatacatattttacctggaaaatggtgtatacttagaaatttcagttgtctctgaattgtcagatggcttctagtgggctgaattatgaattagttaacatacgaaaaacaaaattattaaaatgagtaattttgaggttgatttttttttttttaatttttttcgttaggtgtttggagcatctactaaacagattgatgtttaccgaagtgttgtttgtccaattctggatgaagttattatgggctataattgcactatctttgcgtaagtaaaagggtgttttttctgatttatgaaaaagcttaaatgcttgtgttttttgttgttgtttgtttgttttttgagacggagtttcactcttgttgcccaggctggagtgcaatggcgcgatctcggctcactgcagcctctgcctcctgggttcaagcaattctcctgtttcagcctcccaagtagctgggattacagctgcctgccaccatgcccgctaatttttgtatttttagtagagacgtggtttcactgtgttggccaggctggtctcgaactccggacctcaggtgatccgcccacctcggcctcccaaagtgttgggattataggcttgagccactgtgcctggcttgttttttgtttttctagtctatcactaagagtcatatgggtgcatgtttctttttgatttaacacttgttaatctttacaggtatggccaaactggcactggaaaaacttttacaatggaaggtgaaaggtcacctaatgaagagtatacctgggaagaggtatttattgtttataacatacttttatctctaatgtgactgaaatttaactgtataaaacttgtttgagggcctctgtcttggaatagagatcagagtacctatgtcaaaatgaacttaggataaaccactactacagtaaaattaaagtgcatggtatgactcctgtttaagaaacagcctcaatggaagaggaaggaccaatatatatggcacagttatatgataaaagaggagtctatttatgacagaatggttggagcagaatattgtagaaaagttggaatatgagtgaagcttgaaggcagggagggctttgtattgaaggaatgggtctcagaaagttagcatggccaggggaagtatagtactttattcatgatgatcctaagtgttcaagaaattaagatgaatgtattgtttaatattgcagaaagcatatactatgttttacaaagatttccatgaatttaagtgagtttaataactaagagagagaaccaatactggaagaaagttgaaagaagaccaagacaagttgaactagagctgaagtgttaaaacttttaaaaaaaagtttagttttaaatttagtaatgtgtttaaatttaaatgagtttaataactagttaattggtcgggcacggtggctcatgcctgtaatcctagcactttgggaggctgaggcgggcagatcacctgaggtcagcagttcgagaccagcctggccaacatggtgaaacccggtctctactaaaaatacaaaaattagctgggtgtggtggtgcatacgtgtaatcccagctacctgagaacgagactctgtctcaaaaaaaaacaaaaaaacaaaaaaccaaaaaactagttaatttaaaaaaaaaaagaattttttttaatttttttttttttttttaaattttaaagtgatggggtcccactgtgttccccaggccagtcttgaactcttgggcttcaggagtcctcccacttcagcctcctgagtagctgggattagaggcacatactaccttgcccagctaattttccaaattattgacagttgggtagaacctttcttctagtggttacataattgagtcattaacttactttacatatatagataataaagttatgaaattgttaccataggagatatggaataggcttaaagcatagtttcgctgggcagaattattgaacttggcgttttttttttgagacggagtctcgctctgtcgcccaggctggagtacagtggctcgatcttggctcactgcaacctccacctcccgggttcaagtgattctcctgcctcagcctcctgagtagctgggactacaggtacataccaccaagtccggctaatttttgtatttttagtagagatggggtttcaccgtgttggccgggatggtcttgatctcctgaccttgtgatccacctgccttgacctcccaaagtgctgggattataggcgtgagccaccgtgcctggccgaacttggctttttaagtagataggttccattggtttctatgtaatgctcagggatgaagatggctaagaagtgtgacaggtttatggagggtgtgaagactactgtagaacagactgttgtaaatgacttctctaacattaggttagttgtttctttttttgttttgttttaacttgctttgccatacttatgtttaaatatattataaaggaggcccatgtattttaactgccacagtaaatggcattcttcctttatattagtccttattataatttcaggatcccttggctggtataattccacgtacccttcatcaaatttttgagaaacttactgataatggtactgaattttcagtcaaagtgtctctgttggagatctataatgaagagctttttgatcttcttaatccatcatctgatgtttctgagagactacagatgtttgatgatccccgtaacaaggtaattcagtctttgagaatgaaatgtctctgaattttaatgtgtgaggctttgagaagtcagagagagagagagagagagagagagagagagagagagtgtgtgtgtgtgtgtgtgtgtgtgtgtgtgtgtgtgtgttttaaccaatctaatggatgttcttttggtattttggtcagagaggagtgataattaaaggtttagaagaaattacagtacacaacaaggatgaagtctatcaaattttagaaaagggggcagcaaaaaggacaactgcagctactctgatgaatgcatactctaggtaagaaagccatagtctcttccctagccccattttcttttaagaagaattaggaacttggagaaagtcaaattggggtgggtcagggtatgtgggtcacgtacctagagtttgtgttataaggaggggtcattggtaattggcttgagatttatatggaaggaaccaatattggaagaatgttgaaaggagaacaaagataagttgaaccatagctgaagtattaaacttttttttcttttttgagacgaattttcgctcttgttacccaggctggagtgcagtggcgcgatcttgactcactgcaacctctgcccaccgggttgaagcaattctcctgcctcagcctcttgagtagctgggattacaggtgtctgccactacgcccagctaatttttgtatttttggtagagatgtggtttcaccatgttggccaggctggtctcgaactcctgacctcaggtgaaccacctgccttggcctcccaaagtgctgagattacacgtgtgagccacggcgcccggcctaaacttttttaaagtagaagaatccttttattctagtaacatgatatatggaagcccaggataaaatgtggctgctatagttgattttggaatgggacgctctgaggcttacctccttagccttatgaaggggtccctgaggcacttttgtggagccccctactgatattagaatatagtttgaaaacccttgcattgaataaggattagaagttaggtcttttaaaatggctttattttagtgtgggagacagatggtcactaacactggctttcatggggtgaaagggatgatttttttcgctctaaatatcttttaccgaaatataaaattcctttttaaaaaattgtttattttcctctcttaccactctattcattgagatataaaatccctgtcataaatttacgtaagttagaaactccttttttcttgtaaagacccgtacaggacaaattccaaattctacagatatagtttactaaaacagaagtggtttttttgtgtgtgtgtgtggtctttaaacctcagaatgtaatagaaaaagcaatggattgcaattagatatttgcgtgtagtctcagtttcgcggttaattcagtatgtgactttttgtaaataagtgaatttatctgcttatcagtttctctgagctacaaaattattgttaggattagaagtcttatttcttttctggcttgtagttgaaaatttctataaaatgccataacaattacagttgcaactctaaaaaagtttgcatttaaagaaagaagaaaaatataacataaaagtgattaagatcatggaattttggatgatttcaaaattttaattaaattttcacttaatggctttccaataaaatggaaattttattctgtggttgattataacttaatttcatgtagaattttgagaactgaactaaagactaggtaaaatttctttaggtacatttcactaaagtataaaatttctatttttccttttttcttgtatgtagacttgtataaaggtcactttttatgaaggtatgtgacaaagaggagaagctaattaattcagttttcccaaattagagctaacttcaatgcttatttgtattaattgcctaatctggattaggaatgggtagataatggtagaaaaacatgagatgaatagtattattattattattattatttttgagacagagcctctctctgtcccccaggctggagtgaagtgatgcgatctcggctcactgcaagctctgcctcccgggttcacgccattctcctgcctcagcctcctgagtagctgggactacaggtgcccaccaccacgcctggctaattttttgtatttttagtagagacggggtttcactgtgttagccaggttggtctcgatctcctgacctcgtgatccgtccacctcggcttcccaaagtgattacaggcgtgaggcaccatgcccggtggagatgaatattataattcagatctatagtttacatttatgtttttccttaggtcttcctccttttctgtaattttaaataatttaaataattttataaaaatgatacttggctgggcgcgatggctgacgcttgtaatcccagcactttcggaggccaaggtgggtggatcacttgaggtccggagttcaagaccagcctggccaacgtggtgaaaccccgtctctactaaaaatacaaaaattagcttggtgtggtggcgtgtgcctgtaatcccagatactcggtaggctgaggcaggagaactgcttgaacccaggaggcagaagtttcagtgagctgagatcatgccattgcactctagcctgggcaataagtctcaaataaataaataattaaaaaagatacttaattttttttttaagtaacatgaaagtacaaagaagaaaattgaaacttaccagattctctgtcaattgtcagtgatattaacaaacataataatgttcaccaaatgccattggatacagaaagaatgtctttggtcatctgtataattttttttccccctaagataaaaagcacagtatttgttttgttttttgtttttttgtttgcttgtttgtttttttgtgatttttttttttgagacagcgtctcactttgtcacccaggctggagtgcagtaactcaatcatggcttactgcagccttgacctcctgggctaaagtgatcctcccacctgagcctccagggtagctggaactgtaggagcgtgccaccacgcccagctaatttttaaatttttttgtagagatgatggtcccactatgttgcccaggctggtttcgaactcctgagttaaagtgaccctcctaccttggcctcccaaagtgttgggattacaggcatgagctaccacccctggcctgaatatcagtatttagcataaggtagacttttgaacattttataatctagcagtgattatcttgtagtgttttagtaatcatgctgtttactatttctgctgttaggggataggagtcatctatttctgatgacagtctcaaagcagagaagtgtacttgtgcatgtacacaacagctgacatggatgggaaggtggaagagtaaactaatgccttacctggtaccatttgaatttatggtaatgacatatttcaaatggttcttatgaatagaagatgattacaagccatctcttcttgacataccaggcaactgtttcgaccccacccacatccagctttcagaggtgcctcaggattctaagtcttttagagagcttcttattgatgcctcttttgcaggcagtagatatgagaaaacaaaatcctaatcactgttctatctatctcctatcttccaaaatattcttgatatctcctgtctgatgttatctttctctactcatgtggatttagatcttctttcctgttttcagtatttcagaagcagcaaatgctattttacattataatgactgggcaacttgatattgttttctagtcgttcccactcagttttctctgttacaatacatatgaaagaaactacgattgatggagaagagcttgttaaaatcggaaagttgaacttggtaagcatccaccttaatactactgtttcactcttaaacaccttatagagcagcttgaaattttgtccttgagacaaaatttttgtggtcactgggtgattagctttgtagtgggagaagaaatttgttaattacagaaaaaattattttgctggcgatttaatacattatgtatcctgtgagaatgaaagtctttgaatccaaatccaatagactcactttttatttttatttttaaaattaaaggttgatcttgcaggaagtgaaaacattggccgttctggagctgttgataagagagctcgggaagctggaaatataaatcaatccctgttgactttgggaagggtcattactgcccttgtagaaagaacacctcatgttccttatcgagaatctaaactaactagaatcctccaggattctcttggagggcgtacaagaacatctataattgcaacaatttctcctgcatctctcaatcttgaggtaagccctttgaaaggaagctgcaagtgtagtagctgtaattcttatttggctattatatattttaaaagttcatttactaggatggacacagtgactcacacctgtaaacccagcactttggaagtccaaggtgggcggatcacttgagcttaggagtgcctgggcaacatgccgaaaccctgtctctaccaaaaatacaaaaaattagctgggtttggtggtgtacaactgtggtcccagctacttggggggctgaggtgggaggatcacttaagcctgggaggcagaagttgcattaagctgagatcatgcaactacactccagcctgggtggcagagggagaccccatctcaaaaaaaaaaaagtatgtgtataaaaaaaaagaaaagtatgtgtatacacacacacacacacacacacacacacacacacacacacacacatatagtagggaaaaaaagttcatttagtagcttcatttttttttttttgagacaaatcccactcttgtcccccagactggagtgcgatgacgcgatctcggctcactgcaacctccacctcccaggttcaagcgattctcctgcctcagcctcccaagtagctgggattacaggcacctgccaccacgcccacctaatttttgtatttttagtagagacgtggtttcaccttgttggccaggctggtctcaaacccctgacctcaggtgagccgcccgcctttgtctcccaaagttctaggattacacgcgtgtgccactactcagcctagcttcgttcattctatgctataatgtaaaagaatctggacattgcatatgaatatatacaggaggacactcctgaagaagttatctttttccttcctggcagagtttttaaccttaaaaagccagtttcttaatggctttttccacacagtcttcaaagaaaattgctgtggtcattagcagtgggtggtgtatggagatttaattgaggacttagaagcaggccaagtgaatgctcgctagtgtggtagaggctgcttagagaacactgaagatggcgttggatgtgtgagaacagagaggaaaaccaagaaaagtaacaaagatggtaaaatgtacgcttattttattgctatcatctgccttaagtggaaattttatttatttattaatttttttacttttagaggtagagtctcatactgttgccaaggccgcagtacagtagcatgatcatggctcactgcaacttaaattcctggactcaagtgattcccccaaccacagcctcctcctgagtagctagtactacaagtgtgagccaccaggcctggctaagttttgttttgttttgttttaaatagagacagaggtctcactatgttgcccaggctggtcttgaactcctgggctcaagggatcctcctacctcagcctcccaaaatgctgcgattataggcatgagccacctcacttgacctaaatggattttaaaaagcttttttaggccaggcacggtggcttacgcctgtaatcccagcactttgggaggctgaggtgagtggatcatctgagctcaggagttcaagaccagcctgagcaacatggtgaaaccccatctctactaaaaaatacaaaaaattagctgggcatggtggtgcgcgcctgtaatcccaactactcaggaggctgaggcgggagagttgcttgaacccaggaggtggagattgtagtgagccgagattgcgccattgcactcaagcctgggtgacagagtgagactctgtctcaaaaaaacaaaaaagcttttttaaggtgtccaactgccccttcattaaaaaaaaatctttgttgagatttaattcacataccataaaattcactgatttaaagtatattaatttaataattctagtatatttacagagttgtccaaccatcaccaaaatctaagttttgaacattttcataacctcagaaagaaagcctgtacccattgaaattacttttccatttgccccactcccatcgctactgctttttgcatctatatatttgcctattctgggtatttcatataaatggaattacgtaataggtagttttttgtgactggcttctttcacttagcataatgttttcaaggttcatctgtgttgtaccagcaatactttattcctttttacaggtgaatattattctatagtatggatatgggatttttttgtttttttttttttttgagatggagtctcgctctgttgcctaggctggagtgcaatggtgtggttttgactcactgcagtcttcgccacccgggttcaagtgattctcctgcctcagcctcctgagtagctgggattacaggcgccaccaccatgcctggctaatttttgtatttgtggtggagacagggtttcaccatgttggccaggctggtctcgaactcttgacctcatgattcacccgccccggccttccaaagtgctgggattacaggtgtgagccactgtgcccggctgatataggacattttgtttattcatcagttggtagattgattgagctttgtggtttttttgttttgttttgtttttttgttttttttttttgagacaaggtccctctctgttggctggagtgcagtggcacattcactgtaacctcaacctcctggccttaagtgatcctcccaccttagactcccaagtaggtgggactataggcacatactactatgcccagctaatatttatttatttattgtagaaacaggatctccctatgttgccaaggctggtctcgaattcctgggctcaagtgaccctcatgccttggcctccaaagtgctggaattacaaatgtgagccatcattgagtttaagaatagtctaaaggaaattatcctaagggtcgagactctgaaaattgaagagaagggaaaaaaggattgaacaacttcctttttaaaggttgggcatagtggtcttaatgactagattttaaaattagatataactataaaatattacttgtaagttattatataacatattttagataacagaactacattattctcacaatatcttcagtaattgacctttcctttccatgacaggaaactctgagtacattggaatatgctcatagagcaaagaacatattgaataagcctgaagtgaatcagaaactcaccaaaaaagctcttattaaggtaactgtgaatttttgtagagtaatgtaatcttgtttgacaaatgtgaaaataagaaactgaagtgggagataatagttaaacaagatttgttaaattgcccatggaaggctttttatatagtgatttaaactaaatgtcttacatgttaacatatttttttctaatgctagtatgttgactttaccaactttatcaactgagttggtactcttagcaaaattttcatttatttacatttacaaaatttatttatttgcatttttgaggtataatttacatgccataacatccacctaatgtaagcatacaattcaatgatttatagtgcatttacagagttgtggagtataaccacgatctagttttagaaaatttgttatcactatccagtttccctttgctcctttacaatcatgtggccactgacctgctttctgtctacagatttgccttttctggacgtttcctataaatggaatcatgtaatatttggtcttttgcatctagtttcttttgcctagcataaccatttggggttccacttataacatgtatcagtagtttatttctttttattgctgaatagtattcaattatatgctgataatatgacatttggatcatttccactaatgccattgtgaacatttctgtacatgtctttgtgttgatgtgttttcatttcttttgggtagatatctagggatttaatttctgggttgtatagtaagtttatgctctaagaaacttttccatgtagctgtaccactttgtatttcctacagcagtttatgaggtctgcaatttctccacctcctctttaacacttgttatggtcggtctttttaattttaaccattctaaggagtataaaatggtacttcagtacggtttttttgtttttgtttttgtttttttttttgagatgaagtctcgctctttcacccaggctggagtgcagtggcacgatcttgactcagtgcaacctccgcctcccaggttcaagtgattcttcgacctcagtctcccgagtagctgggactacaggtgtgcaccaccacgtctagctaatttttgtacttttagtagagatggggtttcaccatgttggccaggctggtcttgaactcctgacctcgtaatctgcccgcctcagcctcccaaaatgctgggatcacaggcgtgagccaatacgcctggccccaatatggttttaattagcatttccctaatgactaatgatgttgaacatcttttcttgtgcttattatctatttgtttatcttttttggtgaaatgtctattcaaatgctttgcccaattttaattggtttgtcttattaagttgtaaggagttcatgtagtctagatacaagcccttaatgagatatgatttgcaaatatttcctcccagtctggctttactttttcctttccttgatgttttttttttttttaaataaagtttttagtattgagatgattatagattcacatgcagttataagaaataatacagagaaaacaggccaggcacggtggctcatgcctgtaatcccagcactttgggaggccgaggtaggcggattgctttagatcaggagttcgagaccagcctggctaacatagtgaaaccctcatctctactaaaaatacaaaaattagctgagcgtagtggcacgtgcctgtaatcccagttactcaggaggctgagacaggagaattgcttgaactcgggagacaggttgcagtgagctgagatcgagccactgtactacagcctgggagacagagtgaggctctgtctcaaaaaaaaaaaaaagaaaaaaagtaataatacagagaaatcctttgtacattttgttgaactatagaatattaccacggggatattgatattaataacaatccactaatctttcccaattttccttacatgtgtatgtgtatttaattctagacagttttgtcacatgtataggttcatgtatttaccaccacaatcaagatactgaacagttccatcaccacgaggacccttcatattgctcttttgtaaccacttttcttcccaccatatccttcctttcctggtacccagtaacctgtcctctatcatttcaagactgttattgattggaatcatacattatgtaaacgtttgagattgccttatttatttatttatttatttattttgagatggagtctcactctgttgcccaggctggagtgcagtggtgcgatctcagctcacagcaacctccgcctcccgggttcaagcgattctccttcctcactctcccaagtagctgggattacaggtgtttgccaccatgtccagataattttttgtatttttagtagagacggggtttcaccatgttcgccaggctgggtctcaaactcttgaccttgtgatccacccaccttggcctcccaaagtgctgggattacaggcttgagccactgcacccagcagatctttcttttttagtactaagtagtagtccatggtgagtatgtaccatacatacagtttttgtaaccattcacttattgaataacatatgagctaatttcagtttttctgctattacaaacaaaactgctattgacattcatttataggtatttatgtaaacataaatttttatttctctgggataattgcccaagagtgcaattgctgggttgtataataattgaatgtttattattttagggaactgcctgtttttcaaattggctgtatcattttacagtgtatgagtgatctgatttcttcacatcctcaccagcatttggtggtgtaacttttttattttagtcattctgataggtgtggtaggtgatagatatctcattgtggtttttaacttgaatttttctaaaggctaatgatgttgagtgtctttttaatgtgcttatttgatgtttatatatttatgtatatatagcatatacatatattgcatatttatatataacatatacatgtatatatatatttatttcccattataatttatttggggaaatatctgtatatttgtcctgtagagttttaccatagtatcttttgacgtgttcctctgttctttgtattttctttgtaaatcggtagctgaatcttgaggcttgattaaattcaagttttgtcttatttatttttggcaaaactaattcataagcagtagtgtcttcttccatttagaagtatgtaatgtctggttctttgtcttttttttttttttttttttgagacggagtctcgctctgttgcccaggctagagtgcagtggtgccatctcggctcactgcaagcttcacctcctgggttcacaccattctcctgccttagcctcctgagtagctgggactacaggcgcctgtcaccacgcccggctaattttttgtatttttagtagagacagggtttcaccatgttagccaggatagtcttgatctcctgaccttgtgatccgcccgcctcggcctcccaaagtgctgggattacaggcgtgagccaccgcgtccggccagaggtatagttcttataggaaaggcaggacacatgcttgattaatttcctttatttgccaattttgagaataatgagttggtttcctaggtttcttagtgtcattataaactcctagatttaaactatttgtgttaacccattgtagttgttctcctcaccgatgctcagattggctcatcttaggccaggggtatgttagtctgttttcatgctgctgataaagacatacccgagactgggcaatttacaaaagaaagaggtttattggacttatagttccacatgtctggggaggcctcataatcatggcggaaggcaaggacgagcaagtcacatcttacgtgggtggcagcaggcaaagagagagagcttgtgtggagaaactcctgtttgtaaaaccatcagatctcgtgagacccattccctgtaatgagaacagcatggaaaagatccgcccctacgattcagtcatctcccaccaggtccctcccgcaacgcgtgggaattatgggagctacaagatgagatttaggtggggacacagagccaaaccatattaaggggttacatcttcaagtggcttactgagtccttttgattaacctagtaggctttgcttagcttatttccttgtcttatttgacaagatgttccgtattcatcttgaatattttctgcctcagtcctggaatcagatgcttttataaggaatcctggttcattttagtgtgaattactcctaccaacctgggtactggaggttgtggtttttcttgggaagtccatatttctagaatgagtgtatttaaaaaggagctttgaaagactttatttctaaacaaattaatattgattaaaaagtatggttataactttttatcatacttctttaagttttaaaagacataaaaaggctaactttacattttatttgttgcatgtccttcccaaactgaatgaaaaaagtactaaactgacacctacaacattcctcttgtgtaggagtatacggaggagatagaacgtttaaaacgagatcttgctgcagcccgtgagaaaaatggagtgtatatttctgaagaaaattttaggtaagcccttggctatggagttaatttccaagaataagcatttctgataacaggctatttgaagtaaaacttatgtagcagtaagtaaaatctttatatccagtgccgataaatacttcattttgtgtgtgtgtgtgttttcttttgagacaaggtctcgcactgtcacccagactggagcacagtggcacaatcttggctcactacgtcctcagtctcctgggctcaagcgatcctcctgcctcagcctcccaagtagctgggattataggcatgagccaccacaccctgctaatttttgcatttttttgtagagacagggtttcaccatgctgcctaggcttctattttgttttgacattaacaagtagctatcaaacactttttaaaaatcttttactaacttttaatttttaaatcattaattcatgtgaagtttcaagaagagtacaagagaggtttcatgtattcttcacccagtcttcctcagtggttatctcttaaataattatagtacaaggctggatgtggtggctcacacctgtgaatcccagcactttgggaggccaaggcaggcagatcacgtgaggttgggagtttgagattagtctgaccaacatggagaaaccccatcactactaaaaacacaaaattaccctgtgtggtggtacatgcccgtaatcatagctactccagaggctgaggcaggagaattgcttgaagctgggaggcggaggttgtggtgagccaagatcgcgccattgcactccagcctgggcaacaagagtgaaactctgtctcaaaaataagtaaataaaataatagataaataaaaaataggcgcgataaataaaaaataggctgggcgccgtggctcacgcctgtaatcccagcactttgggaggctgaggcaggcagatcacctgaggtcaggagttcgagaccagcctggccaacatggtgaaaccccgtctctactaaaaatactaaaattagccaggcatggtggcaggtgcttgtaatcccagctactcgggaggctgaggcaggagaatcacttgaacctgggaggcagaggttgcagtgagctgagatagcagcattgcactccagcctggggaacaagagcgagacttcatctcaaaaaagaaaaaggaaaaaataataataaaataaataaaaaataattatagtacaatatcaaagctgggaagttgaccttgatacaatatgtgtattagtttgttcttatactactatagagaaccacctgagactgggtaatttataaagaaaagaggtttaattggctcacagttccataggctgtacaggaggcatggctggggaggcttcaggaaacttacaatcctggtagaagagctaaggagaagcaagcacatattcacatggcggcaggagagagaaagtgaagaggaaagcactgcacacttttaaacaaccagatcttgtgagaactcattcactatcatgagaacagcaagggggaagtccatctttatcactcggttatctcccatcaggtccctcctccaacatgtggggattataattcaacatgagatttcagtggggacagagaaccagaccatatcaagatgtgtatatagtagttctatgccattttgtcacttgtatagatttgtgtaaccaccactgcaatcaagatacagaactatcctatcatcacaaggatctttcttgctaattcactgtagtcacactcacctcatcttttccatgattcctaacccctggcaaccactaatctgttcactttttaaagccctggagtaatttgttcaaaggaaagcttttattgaggcccattgtataaaacaacaataataacagagaaaacaaggggaagaaggcaagtgggatgctaaggactataacttgaaaattcctgattgtgtttatccttgaagatattaggaagcaagactttcacagagcattttttaaaagttaatagtgataaaagatattagacctaataataaccagaagcattttagtataatcttttactgaacttttttgtagatgttaacactctaatagtatataaatcatttaataaacttagttttttctgtgttacttccaactgtcataatgtattccatgaatgtgtaagatgccctagaatcagaacaatgtaagattgtgggttagtgaacagtttaccatcactaatggaggtgttctttttttgatgctttagaagtaaaaaataattggtgaggcactcaatcctggcctgtagtctttagaaatgatattgattattggaggctttcatctttctgattttatttttgaacttaagaagtaactttggttttcatttgtttagtcccatgattgaaaatatggtgtttgctctctttttttttaacttttattttagtttcaggagtacatgtgcagatttgttctatagatatattgcatgtaacaggagttggtgtacatattattttgtcacccagataataaccatagaacccgatggatagcttttcaatccttgctctcctcttaccctccaccctcaaagaggcccaggtgactattgttcccttcctcatgtccatgtctgctcagggtttagctcctacttataagtgagaacgtttggtgtttggttttctgttcctatgttagtttgtttaggacaatggcatccagctccatccatgttgctgcaaagaacatgatctcattctttttttttttttttttttttcgagacagtcttgctctgtcacccaggctggagtatagtggtgtgatctcggctcactgcaacctctgcctcccaggttcaagtgattctcctaccccagctgcccgagtagctgggattacaagcacctgccaccatgcccagcaaatttttttttttttaagtagagatggggtttcaccatgcaccatgttggccaggctggtcttgaattcctggcctcaagtgatcaactcaccttggtatcctggcgtactgggattacaggcatgtgccactgcacccagccatcttgctcttttttatgcctgtgtagtattccatggtgtatatgtaccacattttctttatccagtctgctgtggatggatagctaggttgattccacgtctttgctgctgtgaatagtgctatgatgaacatatgtgtgcatgtgtctttatggtagaacaatttatattcctttgggtatatacccagtaatgggattgctggctcaaatagtatttctgtgtgtgtgtggtttttttttttttttgagatggagtcttgctctgttgtccagggtggactgcagtggcacaatctcggctcactgcaaactctgccccccaggttcaagcaagtctcctacctccgcctcccaagtatctgggattataggcacccaccaccgcacctggctaatttttgtatttttagtagagatggggtttcaccatgttggccaggctggtctcgaactcctgacctcaagtgatctgcccacctcggcctcccaaagtgctggattacaggtgtgagccaccatgccctgccggtatttctgttttaagttctttgagaagtcgccaaactactttccataatggctgaactaattttcattagtagcatataagcgttcccttttctccacaactttatcaccatgtgttattttttgactttttaataatagccattctgactggtgagatggtttctcattgtggttttgatttgcatttctctaacaattaatggtgttaaacatagtttcatatgcttcttagccacatatatgtcttcttttgaaaaatgtccacatcatttgcccacttttttttttttttttgagacacagtttcactgttgcccaggctggagtgcagtgtggcacgatctcagctcacttcaacctccacctcctgggttcaagcgattctcctgcctcagcctccgaagtagctgggattacaggtgcctgccaccatgcccggctaatttttgtatttttagtagagatgggatttcaccatgttggccaggctggtcttgaattcctgacctcaagtgatctgcccacctccgcctcccaaactgctgggattacaggtgttagctaccgtgccccgctgggtgtatatgattttatacttagaaaaccccatagtctctgtccataagctcctagatctgatcaacaatttaagcagagtttctggatacacaatcattgtactaaaatcagtagcattcctatataccaataatgtccaagctgagtgccaaacaagaatgcaattccattcacaatagccacaaaaacagtaaaatacctaggaatacaactaaccagagaggtgaaggatctctacggtaagaattataaaacactgctgaaagaaatcagagttgacactaacaaatggaaaaactttccatgctcatggataagaagaatcaatattgttaaaatggccataccacccaaagctatttacagattaaatgctgttcctctcaaactaccaatgacattcttcacagaaaaaactattgtaaaattcatgtggaactggaaaagagcccaaatagccaaagcagtcctaagcaaaaagaacaaagctggaggcatcgcattacctgacttcaaactatactacagggctacagtaaccaaaacatcatggtactggtacaaaaacagacacagaccaatggaaccgaatagagagcccagaaataaagccacacacctacagccatctgatcttcgacagaacatgcaatggggataaaactgcctgttcaataaatggtgctgggataactgcctatccatgtgcagaatattgaaactggaccccttccttaacgcccatatacagaaatcaactcaagatggattaaaaacttaaatgtaaaacctaaaactaaaaacccttgtaaaaaacctaggtgtttgttctctaatacacatgaggcataatctgagatagttttgtctgaaaacgcttttggaattagtacagtgtcagtcagagaagaatcacaaaaactacagccaacatttaaaacaggataatgctttatttaagccaagcttaatagacattttaaaaccatatcaaaatcatctcatccatacagtaacaatgttgtattaccccttggcattcactataaaaaagcatttcaaataatcccgttttacataaaagatctatttctatttattttattttatttttatttttatttttgagacagagtctcactctgtcacccaggctggagtgcagtggcgccatcttggctcactgcaagctccgcctcctgggttcacgccattctctcgcctcagcctcctgagtagctgggactacaggtgcccgccaccacgccctgctaattttgtttttgtattttagtagagacagggtttcaccatgttagccaggatggtcttgatctgctgacttcgtgatcttcccgcctcggcctcccaaagtgctaggattacaggcgtgagccaccgcgcctggctgtagaagatccatttttaataaaaagctaatatatttcatcaaaagactattagaattaactcttctcttacagctcttttctagcttttcctttagtcaacaatatctctagctaatacgttaagggaatttgtattcacggaagaatctttgtcatttaagcataatgtgaaatagaaaattgttggttgttatcaaagaattagatgagcaaatacaggcattcatttctgaaactgactaatactcaagaaatcagagacccattaaagtgggtttggaagacctgtgagctttgcgcttgagaaaagcattctctattttactttttatgacttcttttgactttgacttcatcttctgatatttttgttgaatttagaaatttttagtttctaaaaactcttttctgccatccctgtctctccttttgaaaaatatagcatccttttattttatagatctattccttatctcagaaacattattaatgttattaaagttttcttttatgtttttctttcctttgggatcttttttttccctgttgtgatatctgtcatttgtatttattttcttcaaatgtctagtgatttttggctggcaattaagatggattagaagctttgtacatgggtgaggattatggacctgtaagttcactatagatgaaaaagtggtgatctcagtcttaagtctgggcttccatcagatatcattctttgttggattttttttcttttgttctagccctcagtcttttctgagaagatttgcccagtttgcttggagatttttctagctgctgctattttttgattagagtgggtatagggggctgaggattccatcattttgtatgtagatttacacttaaatgctcatttctagtccctaaaccttctacagtccatgatgtctagtgaaagtgaacctggaaattctgctgcaattcctatagactagtggctgtcaatggaagtggtgttgggggactggtggtggtgggtggttttgtcccccagaggacatttggcagagtccagtgacattttttatcatcatgacttggatggtactgaacatcctaaaatgtacaggacatccccacaatgaagaattatttgatccactagtgctgaggctgagaaactctgctctagagagtaatcctttgttctcatgagggttatgcggtggggtgagagtggtgtttgtgcgtgttgcagcagcagggggtgtaattgctctgtatacatactttaagtctcagtttttaacccctaatcttaccccttccttctaagatacctgatgccttcaagtcccacatttttccagcattctgtggggcatatttatattctgtatccctgattatagacacttaggttgcattccctcctctctctactttgagttatagtccgtcctctgttagctttctagcttctcaaatctggaacacacatgcttttcccctcataggtagggattcttagtttcagaattgagggcaagggaaaaatatttcatttataaaacaaagacaaggaatataatttgttctttgtaatttgtatttattgcttattgacacaggtatcaagtgacacttgggtatcaagtgatggtgataaatgttggaaatgagtttgtgtagctgtcacaattgtgttagaatacattttataggagttagaaaaaaatattaactgttaaactcatattaaactttattttagagtcatgagtggaaaattaactgttcaagaagagcagattgtagaattgattgaaaaaattggtgctgttgaggaggagctgaatagggtaagcacttaaaatgatatttactgttatgtgaaaagcaaatattgaaagaaaattttagaatgaaagatctaatattttttccttcaagattttttttttttagacggagtctcgctctgtcacccaggctggagtgcaatagcgtgatctcggctcactgtaacctctgcctcccagggtcaagcgattctcctgcctcagcctcccgagtagctgggattacaggtgtgcaccaccatgcctggctaattttttttgtatttttagtagagacagggtttcaccatgctggccaggctggtcttgaactcctgacctcatgatctgcccatctcagcctcccaaaatgctgggatgacaggcgtgagccactgcacccagctccttcagatttttttggaaaaaaaaaaaagattttattttgctgacccttatactgaaagtaagttatatcatgattttttactatcattaatcacatcaaaaaagctgacagcttatattaataaaacattacaagaaattaactgaattgtttgattttgttattgaaactacaaaatagtgaatgctgaagcagttttgttaacatgtttatcagatgaaggaatacagatattgggagagactggatgttaaataaaagtaatataactagggtaggcaagaggcctgacctttcagggccaccctcatattaatacctttatttatttatttttaattattttttagagacagggtcttgcttgatgcccaggctacagtgcagtggtgtaatcatatcttactgcagcctcaaacttctggtctcaagcaactctcctgcctcagcctcctgagtagctggacttcaggcatgcactaccatgcccggctaattattttatttttttgtagagatggagtcagtctcgctatgttgcccaggctggtctcaaactatggggctcaagtgatctcctgccttggcctcccagagtgctggggttacaggtgtgaaccaccttgccaggccacattaacactgttatattcaaatccattgacaatgttgaaggaaactgaagaattaatagtactacaccagacctattatttaatctcaaagtgttgagtaagattacagaaagaaacaggatgacatatttgtgttaacctaccgggtaacttcttacaacttttgcatggaaataatttgtttcatttttctaatcttatgaactagctagatatcctaccagccagctcagcgttttttaaattcttatatttaggttacagagttgtttatggataataaaaatgaacttgaccagtgtaaatctgacctgcaaaataaaacacaagaacttgaaaccactcaaaaacatttgcaagaaactaaattacaacttgttaaagaagaatatatcacatcagctttggaaagtactgaggagaaacttcatgatgctgccagcaaggtttgtcccttgtgttgatttgtactcatattaagtagagaatgggtagaaaaaattttctgtgcttaagcattaaatattctgtttattcaccccaaatggtatttctgtccatttaaaaaacattattttactatttcatccatgtttttctcactggagatgtcgacttatgaaaaaactactcctgctcctggagttttgaaaatagaacataacttagctgggagtggtggctcacgcctataatcccagcattttgggaggccaaggtgggtggatgacctgaggtcaggtgttcgagaccagcctgaccaacatggagaaacctgtctctactaaaaatacaaaattagccgggcgtggtggcgcatgcctgtaatcccagctactcgggaaggctgaggtggaagaatcacttgaacccgggaggcagaggttgcggtgagccgaaatcacaccattgcactccagcctgggcaacaagagcgaaactccgtctcaaaaaaaaaaaaaaaaaagaaaatagaacataactttataatatattttgtagacatttagaatagtgatgctgtgatgctttttctttgtggggatgattgaacctaattagtcattaagaatttagtatgttctgtccaggcatggtggctcacgcctgtaatcccagcactttgggaggccgaggtgggtggattgcttgaggttaggagttcgagaccagcctgaccaacatggtaaaaccccatctctactaaaaaaaaaaaaatacaaaaattagccaggcgtggtggcacatgcctataatcccatctactcaggaggctgaggcaagagaatcacttgaacccaggaggcagaggttgcagtgaaccgagatcatgccactgcactccagcctgggtaacagagcaagactctgtttcagaaaaaaaaaaaaaaagaatttagtatgttctgatgatgaaagatgttgaaagtatttaattttttttttttttttttgagacggagtctcgctctgtcgcccaggccggactgcggactgcagtggcgcaatctcggctcactgcaagctccgcttcccgggttcacgccattctcctgcctcagcctcccgagtagctgggactacaggcgcccgccaccgcgcccggctaattttttgtatttttagtagagacggggtttcaccttgttagccaggatggtctcgatctcctgacctcatgatccacccacctcggcctcccaaagtgctgggattacaggcgtgagccaccgcgcccggcctttaattttttattagttgtactttttttttttgagacagactcttgctttgtagcccaggctggagtgcagtggcatcatctcagttcactgtaacctttgcctcccgggttcaagcgattctcccgcctcagcctcccaagtagctgggattacaagcgcctgccaccacacccagctaattttgtatttttagtagagactgggtttcaccatgttggccaggctggtctcaaactcctgacctcaggtgatccacctgcctaggcctcccagagcgttgggattacaggtgtaagccaccacgtccggccattaggtgtacttctgaggaaatagtagaacatagaaggaaaaaaatttctgaggaagcataattattgcaataactgaaaaaatcagttttccttgcttgtgtagatggctacaggaagggaaataaacattactgggcatctggataaattagcatgagttaaagcatttcttctgatacaatgtctaaaattgactttttttttttgagacagagtctctctctgtcaccccggctggagtggcagtggcacaatctctggctcactgcaacctccacctcccaggttcaagcaattctcctgcctcagcctcttgagtagctggaactacaagtatgtaccaccacacccagctaatttttgtatttttagtagagacggggtttcaccatgttggccaggctggaaaatttactagttcttatcaagataaatccttgtgtagatactttcatcagattcctttcaccgtatccattttgtctaacacttatttttaaaaatatagctgcttaacacagttgaagaaactacaaaagatgtatctggtctccattccaaactggatcgtaagaaggcagttgaccaacacaatgcagaagctcaggatatttttggcaaaaacctgaatagtctgtttaataatatggaagaattaattaaggatggcagctcaaagcaaaaggccatgctagaagtacataagaccttatttggtaagttcaggctgttctgttctagtcttgatgtgttaagtgtaatgttgatttcaaaactgataattttgtgaaacatagatgacggtgtcaccaatactctctaccatgcacaaactatttgttcagggtgaagattaatgcttttattgtctttgaattaaaacaaatcttttttccctccccaccctcccttctgttttctataaaatgttacatttattaagtaactaagtatataaacgttagaagtagaagtcctctttttccctgactccggctcctgaccctgggtcattgaccataggtgttattgttaaatttcttgggcctttttctggaaattttttgtgcataaacattctgcaactttttttggggggggcatatatatcttgatggtttgctatattgtcagaatatgtttgtgtctcattgtttttaactattatctccctttagaaaaaagtatgtttatttagtgtgaaatactatcctcattatggaaaatttggacattcagaaatataaaaatttaaaaaatcatctagactctagtctcactaagccaagcactatactttttggtattgatttccagttttttttttcttctgtaaacttaccataattctgtatattatttttagttagagattaattgtagaatattctaattctttgtgtactatgaattatagttatgggtctgatacacttacaaatatgttaagggcttacagagcactatagaaaattgtaatgtatatttaaatatttccttgctttgtagtgagccagttcttttaagctcgttattacaaattctacaacaagggtatacttttgtcaacttctttgaaatggtttgaacggtatttaatatatttatgtcaaagtttacatctttctgtttttgtttgttataggtaatctgctgtcttccagtgtctctgcattagataccattactacagtagcacttggatctctcacatctattccagaaaatgtgtctactcatgtttctcagatttttaatatgatactaaaagaacaatcattagcagcagaaagtaaaactgtactacaggaattgattgttagtacatcctttaaaatatttttgaagggttgcatttgataagtatttgataaaatattttgaagggttacatttgataagtctttataaacaatgttaactgctattctttcttcctgagctttactagacacagtcatagacacgtcactgtgagagactacatatatatatattttgttttgttttgttttgtttgtttgttttgagatggagtctcgctctgtcgtccaggagtgcagtggcgtgatctcggctcactgcaagctctacctcccgggttcatgccattctcctgccttagcctcccgagtagctgggactacaggcgcccaccaccacacccggctaattttttgtatttttagtagagatggggtttcaccgtgttagccaggatggtcttgatctcctgaccttgtgatccacccgcctcggcctcccaaagtgctgggattacaggcatgagccaccgtgcccagccagcctctccttttctttatttgtatttatttatttttttcagcctctccttttctcggctcactgcaacctctgcctcctgggttcaagcagttctcttgcctcagcctcccgggtagatggaattataggcatgtgccaccacgcctggctaattttcgtatttttttttagtagagatggtgttttaccatgttggtcaggctggtctcaagctcctaacctcaagcaatccacccacctcggcctcccaaagcgctgggattacaggcgtgagccaccgtgcccggccgagagtacgtttatatttttaaagacagatctctccactgtttattctctcccagaaagattattttcaaatgtatggaactaacttttgaaacctttttcactcatgtcttgtaacattaggagtagcagttattagtgaggcttctaatgactaaagggcaagtttagcaccacatgatatcaagggacttgttagttggcccagaaattggcaagtcactctttccccaggggtcctggacccaaccagaaggggatattgggtagctgattttaaaactacagtaatatatgatagtaataatggtgcaagaaaaatatcttagaattctggggacacatatcacttcttagggttagatctgtgtggccccttctgggccataactataaatcttttctccagagttctatggaagtcactcatctaattgcacttaatattacctccttcatacttgatttatatatagtctttattttataattgtatggttggtctaggaagttcttagccatataatttatttgttttctttgtgcagagtctttgcctccctttttcagcttaacaatatttattaaacattttccaagtaaatactacaaatgttagctgaccctctgcctcaattcagtgcttagatgacattatttgataggttttctcaatcacccaaatttgacaaaattaaaagatatcctgtcagtactaacttttcaaatattgattcattcattaaatggtggtctgtatatatataggcatacttcagagatattgcaggtttgcttccagaccactgcaataaagtgaatattacaataaagcaagtcatgaattttttgctttcccggtgcatataaaggttatgttgaccaggcgcagtggctcacacctgtaattccagcacacgcctggtgggacaatcagaacacaacgtttatcagttacatttgctgtcttataggggtacagtttatggtaccccaagacaattacaatagtaacatcaaagatcattgatcacagtgtataatgaaaaagttagaaatactgtagtagttaccaacatgtgatgcagagacagaaagtgagcacatgatatttgaaaaaagtcactgatagacgtgctcaaggtagggttgccacaaaccttcaatttgtaaaaatttggtatctgtgacacatagtaaggtgaagcacaataaaataagctatgcctgaattgatacatttctacttaccaagttacaatttttgcttgaattaaaagaaaagaggcatgttgctctcacaaaattagttgaaattggtatgctagctcttctttccaaaagaatgtcagtagacctataagtatttactaatgtatttctgttatacttcctcagccctatcctaccaaaaggagattagatcaggattttttttctttttataaatatttccaatctatactacattcttaatttccctatttcttgacaagaacaacatctttcacaagttcttctgatacaataggatgtaagtcatctcagatcttcaaagttaagtacttccagcccaagggctaatcttgatgactacttggtctcagcctttttgactggtaacctaaacttgtttgaaatttattttcttaaaatatacctgtaggtttttaaaaatttattttgtttggagtgctgaaatcttattaactgtcattttcctcttttgaattcttctgacttctatttcattaaactattaaatagttctggctgggtgcggtggctcatctcagcactttgggaggccaaggtgggtggatcacttgaggtcaggagttcgagaccagcctggccaacatggtgaaaccctgtctttactgaaatacaaacattagctaggcgtggtagcaggtgcctgtaatcccagctacttgggaggctgaggcaggtgaatcgcttgaacccaggaggcggaggttgcagtgagccaagatcacgccattgcactccagcctgggccacgagagtgaaactatatctcaaaaaaagaaaaaaagaaattctgtgttttcactgggcttgaaaaaagagaaattattatatttattgtaatataataaattattgtattattgtattgatttatctatgtagagtataaaaaatggagaatggggccgggcgcggtggctcacgcctgtaatctcagcactttgggaggccacggggggcggatcacctgaggtcaggagttccagaccagcctggccaacatggcgaaaccccatctctactaaaaatacaaaaattagctgggtgtggtggctcacacctataatcccagctactccggaggctgaggcaggagaatcacttgaacccaggaggcagaggttgcagtgagccaagatgttgccactgtactccaacctgggtgacagaatgagactccgtctcaaaaaaaaaaaaaaaaaaaaagaatggagaatggaaatgtaaattttaatgtgaatgtttagctaccaaagtatttaagatatcatttagaaaggtttacagaagtggaaatattctttttaaagacctatttgtttatttctgaaaccagaatgtactcaagactgatcttctaagttcactggaaatgattttatccccaactgtggtgtctatactgaaaatcaatagtcaactaaagcatattttcaagacttcattgacagtggccgataaggtaacaaatgctatgttcttaatatctcaaaattgatgtgttgtttaagaaggaaactcatttttgtttcttcaaagatagaagatcaaaaaaaggaactagatggctttctcagtatactgtgtaacaatctacatgaactacaagaaaataccatttgttccttggttgagtcacaaaagcaatgtggaaacctaactgaagacctgaagacaataaagcagacccattcccaggtatgttgtttagcggacttggggagtacagaaagagagttttaggatgatttgatatgacttgataattaatctatgttacacaatctgaatactgtaaaagctgaaacctgaaaataccatagccactgttgcttataacagtaattattgtagaacaattgagaatacttctcttaatatttgaagttttgctacatctagaaccccatgcagaaccacaatatgacaaaacagtccttttctcacatcaagatgaaagatgaatctggaaaaacatacctttagagaagaatggttataacatttaaagtgaaaatgtatctacattaaaacctgctaagttgtttctaggatggcatggatagttgtctttcataaaccaagtcctactttctcttatttctgtctcactgatagacatttaaaacatagtaaatcgatacaacttttaattcttattgattataaatgtaattcatgatttatcttccctgtaaactgttcctcattatatgaggctttaaaccaaaaccaagccttcaaaccataatctgtaaatatcagatatctgaaaaacagcttctggtattcttaagactttaataatgactgtctaaagttttattaaatgagcttattataatatgacagaactcttataatagttaacatttattgagcaattcactgtgtttattcctcccatcaatatagatataaattctattactagtcagatttttaatgaggaaactgagaccctgtgagcatctaatagtatgtagatcatcttgcagaaggtggtagtgatcatactacctgaaaagcatccatgtttgagtggctcttttgtgtgttttttggcaacttaaaactgcagcattttctcatacatctacatagggtatttcccttaaacccgttgagaactttttaggtgtatattctaaggctgatcccctttttataaatttgctgttttgaaatgcttaaaattgttagacagctctttaaaaaaacaatacaaaaaaatctgatctgaaaagtatcttagcatgaatggtttggctttcctggctttaaggaagcaagttcagtatgtgagctatttcttaggttttccagaacttgaaatgagcactactaaaataattatgtaaaactttgaacacatttacatatagataaatataatacctgcattagcattcaaattattaatctgataatacctttgagactagtaaaaatactgacagactttattcataatcagaatgttagatatgtattgtcaactgatgtgttattcagagatactggccaaccagcagactgaagagtgaataagaatgttggatgcattttcagctcttctttggtcattaggatggcttcttcattttgcaatgtagcatgttatatgcctataagagcttgttttcaaagatgtaaaatatgagcaaagataagactatttacattttgttaatatgatccaactaggttctgtaacattttttagctccagtaattgataatatttttggattgcttgacccgttagtatatcacattaattttcccttctagcagtgttatcagttaaaaagcaactatatatatctgtcaaagtgggtcttaaacataatgtgatatatgggttgtttgattagttttgaggtacactgaaagtaatttgttacttacagctaaaatagtaaagtttgctaattatttactttttaaaaaatcctggctggatgtgatggctcatgtctgtaatctcagcactttgagaggctgaggcagggtgatcacttgaggctaggagttcaagaccagcctggtcaacatagcgagatcacgtctctacaaaaaaaatttgtttaaattagccaggcatggtggctcatgcctgtgtagtcccaactacttggaggctgaggaaggaggatcccttgagcccaggaggttgaagctgcagtgagccttgattgtgccactgcactacagcttggacaacagagtgagaccctgtctctaaaaaaaaaaacaaatcctacattttaatatcacttccactgctttcctctgtagaagaaaggtaaagttaactttatctcttgtcaagaatttatataattctcacctatggacaatacttcttgttttgttatcagtcataaaaaatgttcaagtgtcataattttaagtctcttcacttcccacacctttcttacaggaactttgcaagttaatgaatctttggacagagagattctgtgctttggaggaaaagtgtgaaaatatacagaaaccacttagtagtgtccaggaaaatatacagcagtaagctatttttaaattctcttaaacttttctgtaagtctgaaattatttaagaagaaaaagctttaaatagtacaaataattcctctgtgtactttcaaatttctcttttgttaatattttattatgtatgtgtgtatgtatatatatacatgcatataaatgtcttttcattgcgtatttgtgctctcttttaagacattgaaaaacctggctgttacccacaatatattttcgaatttcctcaatcttagaaaacacactaagtaatttcacaatttctaacctatattactgatgaaaaatatactaactagagcagggtttggcaaactgtggctagcaggctggatgcctgttattgcaaataatttcattggacactgtttacatgttgtctttggctgcctttgcactgcagtggcaaagttgagtcattgcatccaggtcattgaacaatagcctaaaatatttgctatctggcttttcaagaaaaagtttgctgattcctgtattagggttttgttttttgtttttgtttttgtttttgcgacggagtcttgctctgtcacccaggctggagtgcagtggagtgatctcagctcactgcaagctccgccttccaggctcacgccattctcctgcctcagcctcccgagtagctgggactacagatgcccgccaccatgcttggctaattttttgtatttttagtagagaggggtttcaccatgttagccaggatggtctcgatctcctgacctcgtgatccgcccgcctcggcctcccaaagtgctgggattgcaggcgtgagccaccacgcccggctctgttttgttttttcagacaaaaacaaacagcctgctctgtagcccaggctgaagtacagtggcgcgagtgcagtggtgtgatcttggctcactgcaacctctgcctcctgagttcaagtgattctcctgcctcagcctcccgagtagctgggattacaggcacataccaccatgcctggctaattttttgtatttttagtagagatggggtttcgccacgttggccaggctgatcttgaactcctggtctcaactgatcctcctacctcggcctcccaaagtgctgggattgcaggtgtgagtcactgctcccagcctgtattagagtttaatgttgctttgtagcctcattgcttgccagttccgcatacttaacatacactacagtcagacctatgttttcttttaggaattttataactttatggtttaacatttatattcatgatccatttaaaaatttttataaaacataggagatttgtcaagtttcagttttttgcctattgagtattctatactcatgaggagaaagatactatatttaccctatttttccccatttaattctgaaattaaacttcctaaagtttcaagctttctttggtgggaagtagtctttaagggtgggtctgctggacagaaattgtttttctttgtctaagaatgtcttgatttccccttcattcctgaaaggtattttcactggctgtggaattcagggttgacaattatttttttccagcatttgaaatatttccattttcttctggcctctatgaaatgagaaatccactgccattcaagtaattgttcccttataggcagtctccctatagctgctttcaaaacttttttgtctttagaaacttgattatattttgtctacttatatttcgttgagtttattctatttgggttttgtttagcttcttgaatctgtaggcttatgcctttcaccaaaacttgggaaattttcatctattaattctttgaatatttttcagccctatactctttttcatctgcccctatgactttgatgacacaaatgttagatcttttattttggtccctcaggagatatgtagaatatatttcttatagatacatatattctctttgttgttcacattggggaaattctattgatctgtcttcatattcactgagtctccttctgtcatctctaacctactgttaaacccattcaatgaggtgttttttcagttattgcttttttatttttagttttataattttcatttgctttttttataccttgtttcttagctaggatttttttcttttccaggagtattttaatttctttttggagcattttttgatggctgctttaaaatccttgccagacaattccaacatctgagttttcttgttgttgccatctattgattgtcttttctcattcaacttgtgatttttgtggttcttgatatatgataagtgatttcctattgtaccttgaagattttgggtattatgttaggagattcaggatcctatttaagtattttttagctggcattcaccctgtttaggcttagcatacagatccaggctcacttttatgggctgtggttccactgacaatttagtttttagagcccttgcagtgttattctgataatgctttgtttgtgtgctacccacatgagaaaaatttgtattctgcttttgttgcatgaagtgttctgtatgtgtcactttgatcaagttgattgatagtgctattcaggtcatccacggccttactgagtttctgcctatttgttctatcagtgacttagagaggagtattgaaatctctaattgtagatttatctattttttttattagttctatcagtttttgcctcgtgtatctgaaactctgttgttgggtgcatatacatttaggattattatatctccttggagaattgacctctttatcattatgtaatatccacttttatttctgataagctcttgttctgaagtctgttttgtctgaaatgaatacaggttttctagctttcctttgattgctatttgtatgatgtatccttctccatctctttacttttggtctaagtctttatatttaaagtgggtttcttatagacagcatgtagttgggtcttgctttttcatcaaatttataatctatgatgttttatttttatttatttatttgagacagagtcttgctctgtggcccaggccggagtacagtggtgcaatcttggctcactgcaacctctgcctcccgggttcaagtgattctcctgcctcagcctcctgagtagctggggctacaggcacacaccaccatgcccagctaatttttaaatttttactagagatggggtttcaccatgttggccaggctggtttcgaactcctgacctcaagtgatttacctgccctggcctcccaaagtgctgggattataggtgtgaggcactgcacccagctgcctttcctcatttaaattgagcactttttatgtttttatctcttccattgacttatttatactttttaaatattccctttttagtagtatgtctaggatttaaagtatacattttaagataatttgaatttgtatacattttaagataatttgaatccattatcaaataatttgctgtttcatgtgtagtgaaaggacattataatagtatattcctgtttcctctttcccgtttgtcattattttcatatgttttacttaggtgtttatatgtgcaataaacacctaatacattgttacttgaattgctttatctattttcttttttaatgtatctactagatttttttttttttttttttgagagggagtcttggtctgtcacccaggctggagtgcagtggtgcaatcttggctcactgcaacctctgcctcccaggttcaagcaattctcctgcctcagcctcccaagtagctgggattacaggcacctaccaccatgcccggctaatttttgtatttttagtagagacgggggtttcaccatattggccaggctagtctcaaactcctgaccttgtgattgcccgcctcagaaatttttaattgcatatgtggcttctattatacttctgttgaacagtgctgttctggaactctagctatcatttatatatccctacctaacttctgtcatttgtttttcaaccctgtttttgatcctgttaagtatagcatgttccattgtgaactcttcctatatgctgaatcaaaaaagtatgtcctactttttattcctagtatctagactgatggatttctaggccattccatagccgtggaggaaatactagagtaggattgaagtaggaagggaagtatgatatactttcttaaggcccatgcaaatcatttttcctgctttcctgacatttattgtctacaccagagtttcccagtatggtctagggactttgtattcatcacccaggaatctaggtgatgtttatgtacacactgcacataactgcgtttggcatttattgtcatggcttatagtacttttaactcaatctcgtcttcccattaagttgtgagattttgttttgttttttttatttgagacagagtcttgctctgtcgcccaggctggagtacaatgacacaatctcagctcactgcaacctctgcctcctagggtcaaccaattctcctgcctcactctctcccaagtagctgagattacaggcacccaccaccacgcccggctaatttattgtatttttaatagagacagggcttcaccatattggccggactggtctctaactcctgacctcaggtgatccacctgcctcggcctcccaaagtgctgggattagaggtgtgagccactatgccttgcccttttttcagtcattgtgactttcacgtgtaggtttggtttttaacatctttgctgactcacttggtttacccacgtggtgtaccatctagtggtaatagagagtcacttcattccacaaggtttaaatcttgtaagataacttggaatgctattatagggcaacttaccgagatggaaattatcaatgaattttaaatgtatgtctaaccaacattaatattatatcaagtttatgttacattgttctatatgtataatttgtcacaccccaatataattttaattattagaaagctttatagctaatttaaacataacatttgtaatgttcatgatttgttttacatactaggcaagggaaactgcttaataacagaataaatgactgattgtccaatttagggactagacaagaggctgtagtagatgccctgaagtaacattgcctagtaagaggaataaaacaagtagacagattttgaaagcatcataactggaggagggttgtgaaaggtttcatgagcaaagatgatcctttcaaaggtcatttaatggcaatgctgtgaaaagacagtggccaaggcatccattctcaatgcagaagatttactaagatcacgggccctggagccagactgtccacgttcagatctgccacttaagagctgagtgatcttgggaagttatatatcctttgagtcttaattccccatttcaacagtgtcattctcttttcctataggaaatctaaggatatagtcaacaaaatgacttttcacagtcaaaaattttgtgctgattctgatggcttctcacaggaactcagaaattttaaccaagaaggtacaaaattggttgaagaatctgtgaaacactctgataaactcaatggcaacctggaaaaaatatctcaagagactgaacagagatgtgaatctctgaacacaagaacagtttatttttctgaacagtgggtatcttccttaaatgaaagggaacaggaacttcacaacttattggaggtaataactttgtaagtggaacttactttggggagaataataatcagaaagttaaatattcttggctaagaatagatttcaaaacaaatgatattttaagctataatgacttaaacttttaagtataatatttggtatgcttacagatgatctcgttttgtgctttgttatatgtcttctcaatcttggaattaatttaacatttgtacagtttctttcctgtatttatccttggtttctgacttagtagtttcttcaaagaagggcaccctgtcttttgatatgtaataccttccacttatatatgctttttttttttttttttttgagatggagtctcactctgttgcccaggctggagtgcaatggcacgatctcagctcactgcaacctccgcctcccaagttcaagcgattctcctgcctcagcctctcgagtagttgggattataggcacctgccaccacacccggctaatttttttgtatttttagtagagatggggtttcactatattggccaggctggtgtcaaactcctgacctcatgatccacccgcctcggcctcccaaagtgctgggattacaggcatgagccactgcgcccggcctatctttgctttttacttttctccaagtacattcaaacctattattattttaagtatttaggttattgttctggtaactaaaggatacttgataggtttatggatttgcttgaacttaacgcttgcatgagccctttgtaacttggttttttctttctttgcattaataggattttactaacattctcaggaagtaggtacaaagaattaaaatttttaatctatataagctgttttcactaaaaggaactagagtttgtatacaaatagctaatttcagatttgtgataggaaatgtataatatatgagcctagagatcttgtcataccagagagtaaggaagctgttaaagatttctgaggttgtcaaaaggtcttagtagccaacctccccatcttcaaaggtggcataatttgagcatcaaaaagaataatggccataatggattaaaacatatcaaatatattaaaacttacgaactcataaaaatttcataggtctcctttggatcatgctagggaagcaacacattgtcctgaaaatgggtaaagaagaagaaaaaatttagcatccatctgtctttcctaaaagaaccatatcttggtttagcagggtaatgaagaaaagtgtttcattagactctaagctaataaaatggagaagaaatgatagaattaatatatcaccagtatgcaactcttaataaaataacccctgtggatgttaatgatggcttaaaccatttgatcaaaagctgttggggaactttataattaataggctaaccatacctgaactcactgataaatcttaacatgagagacacagcaaagcattttgtgcttgcagtactacctatgaaatactcttgctaaaaaattaaacctgaattaaatcaagcctttaggtctaaccagtttgtagaaaataaagcatagaaatgcagttgaccaaatccagaatttgagatgttcaatggggtaaagacctcatgtcttcagcaacaagttttttttttcaagggaaaaaatatgagaaacaataacctgtatatcaaaagagacttaagactagaggtccttaagtcttagtttgcctgagacagtccttgttgatattgttgtattagaatgattattaagaatgggccctttcactccaaaaggtgtcccaatttggatgataaattatatagtcaccgacttaagacctatgaaccaaatctagtggtgaattctggttcaaacaaagcaattgtgacacacatttgagacgactggtgaagtttgaacatggactagacatttgataggaaggaatcagtgttaacctttttagatgtgatagtggtcttaaagtgctcttacctcttagagatacatgctgaagtaaatggatgaaatgatacaggatttgtttcaaaataatcctgggtttatggaggagttgagtggccagtcctgttggtaaatgtctgtactccacttgttggtaaatgttgaagctgggtaatgaatacaagggagttaattatactgttctctctacttttgtatgtgtttttaaatcttttattactgaaggccaggtgtggtggctcatgcctgtaatctttggaggtcaaggtgggcagattgcttgagcccaggagtttgagaccagcttgggcaacatggtgaaatgccatctcttcaaaaaatacaaaaattagccaggcatggtggtacatgcctgtagtcccagctacctgggaggctgaggtgggaggatggcttgagcctgggaggtcaaggctgtagtgagcactactcatgccactgcactccagcctgggcaacagagtgagacttgtctccaaaaaaaaaaaaaattatggaaaaggtaagggaaaatatgatgttgaataaaacactggcaactttaattttagtaataaatatttatttgcatcatttacaggttgtaagccaatgttgtgaggcttcaagttcagacatcactgagaaatcagatggacgtaaggcagctcatgagaaacagcataacatttttcttgatcagatgactattgatgaagataaattgatagcacaaaatctagaacttaatgaaaccataaaaattggtttgactaagcttaattgctttctggaacaggatctgaaactggatatcccaacaggtactttaaaagagaaatagaattgttaaattttttgaagtcgaattcaactctatgtagtgtcagatgttcagaaaaattaggtcctgccattgcctgacagaaatttaacatctcactgtaatcaactcaaaatgggaaaactggaaccttaaaatagttttaatcaagtgtcatgatacaggtggtatcacaattcagtataatttcacatactttcagggagttgactttgttaataggggattttttaaaacaaatacaaacctagcactgtttgtaaaaggacattttaataccacaaatatgggagagatgtaactgactaaatctagtttaatgcaaagtttaccacattgtgcattttgttctgtgtccctctcattttgtcatagactattgccatttaggaatccctgttttaagagatcagggatcaccatggaccattagcatttaggaatcaacattttgagagatcacatatggcaaagatcattataggctgtaatgattcagggaggtcttcatggaagagatgtaacaagctgttttacacagcatgaataattgggttcttcattggattatggtaatggttgcacaccctgtaaactcactaaaatccactgaattgtacacataaaatgagtgttttatggtatgtaaattatatcacaaaactcttttttttttttaatttaaaaagcaattgttaaaaggggatggtgctacatagaatgttggtttatttattccccaagagacctgtaggatttactgtctacttttcaatgaagttaggaatgtaaatgttgagtgaaaaggcaagtacttttgtaaatcatgagagcatgagcttattacagagaaatataactgggggcctgatgcggtggctcacacctataatcccagcacttcgggaggcaaggcaggaggatcgtttgagcccaggggttcaagaccagcctgggcaacatagtatatgtatataactagttaatatttaaccaccacaccacatttatagtgaaatgattactcctatcaaagtaatcatgttgggaaatctactcattccaataatgctgccatttttttcagaacactataactccttttagagcttataacacatcttttatatatcctcagagatggtaaacttcatgttttagagagtaggatgaatcttgaaaacagtaaagtctgtcatcaaattagaaagtattgttagttgcaaacaatgtctgacaggtagcaagactgatcctcatatatggcaattatatttttatatttttagaagacaagattaattaggaagttttaggtttttttaaaaatatttacatctcatactttaatttttacctcttatctaatgtccgttaaaggtacgacaccacagaggaaaagttatttatacccatcaacactggtaagaactgaaccacgtgaacatctccttgatcagctgaaaaggaaacagcctgagctgttaatgatgctaaactgttcagaaaacaacaaagaagagacaattccggtaaatttaaaggatcatattttataatagaactcttttatgaactcttgatgtggctgacttcatgtgaagaattttactgtttacccctcaatcttaccccgcctctcattaatgataggcctagcccttaggcttgtttcttttaatcttactagtttttaaattatgctagtagataataatagccaatacttaatattgtgcttagtaacattgttatataggaacctctactctctataaaaatatattaggaattattttcattaatttgtagactttctaataattttgttgaggtttaacttttatattataccatgggcattgtgttatactcaaagctgctgttactcttgtgatgacttttaagcccttggacttagtcactcatccagtttcttcttttaggatgtggatgtagaagaggcagttctggggcagtatactgaagaacctctaagtcaagagccatctgtagatgctggtgtggattgttcatcaattggcggggttccatttttccaggtatgtcatatcagataacccttccacatctgatgtaagtcattcatttactattcattataaaggtattgttcgtggtgagcagaacaacaaaaacctttcaattattccttaggatggcttgttaacgcttatgatttgaattatttacaaaaatctgatattgataaggggttttctgtagaataaatgaaggcagaatttgacttaatctacatccttagctgataatctttagctattgtatttattccttttctgcttgctatatactcagacactgagagcagtcatttctcttccttctacctttgacatgtaagtcttggaacctatctctgcccataatcagactttgaaggcaaagtgattgaaaagattgagagactggaggcctcttaggttatattagtgatttctcctgcctgaggctcttctcttgtaaactgttgccccatgtttcctgagcaccttgcctgctctaatccagtgtaattaaatcctgtgacctctcctacccactcttcttttttttttgagactgagtcacccaggctgaagtggagtggcacgatcttggctcacttaacctccgcctcctgagttcaagtgattctcctgactcagcctcccgggtagctaggattacaggcatgcaccaccacacctggctaatttttttgtatttttagtagagacagggtttcactatgtgggccaggctggtctcaaactcctgacctcaagttatctaccctcctcggcctcccaaagtgctgggattacaggcgtgagccactgtgcccagccctctacccacttttttttttcttttgagacggagcttcgctcttgtttcccaggctggagtgcaatggcacgatcttggctcaccgcaacttccacctcctgggttcaagtgattctcctgcctcagcctcccgagtagccaggattacaggcatgtgccaccatgcctggctaattttgtttttttttttttttttttttttttttttttttttttttttagtagagggggtttctctgtgttggtcaggctggtctcgaactcccaacttcaggtgatctgcctgcctcggcctcccgtagtgctgggattacaggtgtgagccaccggcccggcccctcctacccactttttaacactgttgagaacatagttggtttatgattcatctcagcattgatgactgagtacacaatcaatgtcaccagtcccttaatgttctctatgggtaagtaggaggattccaatgaaatacaacttccaagtgaggctctataaagtgctggtatcttttcctctaatttgagggtacaagcctagacagagtgtgtgaaggaaaaatttccttacgtaggacattggtatctacatttacagttgaagttctacttctgagatgcatatgcttgtaccttttttttttttttttttttttaaatatatatagagagagggtcttgctatgttggccagactggtcttgaactcttggcctcaagcagccctcctacctcagcctcccaaaatgctaggattacaggcatgaaccactgcgcctggctgcttgtaccttttttgtgtgtatgtcttgttttgtttttttgtttttgagacggagttttgctcttgttgcccaggccagagtgcaattgcctgatcttggctcaccacaatctccgcctcccgggttctagcgattctcttgcctcatcctcccgagtagctgggattacaggcatgcaccaccacacctggctaatattgtatttttagtagagaaggggtttctccatgttggtcaggctaatcttgaactcccgacctcaggtgatccgcccgcctcggcctcccaaagtgctgggattacaagcgtgagccaccgcgctcggcctgtaactgttttttaatagatctacagctccttcccttaaggtctaaagattctccatccctgctttcaacagttaacaaagttccaactcagattctcataaattcctccctgtcttcctctgggcaattttattcccaaattcttgccaccttttgctttattccttactattagagaactataaatatgtttctttcagttttcatccttttcttctatcttataaagttaggaaagggggaaggataagagaacctggtgactacttaatccctggtcagaaatcgttttattattattatctgtggcattttgaattaggcttagtgattcagctatggcaaggaagtccctacagtaccagaaagggtttgggatggggttttagaccttcagctgaagtccagaaatgatcttttccctagtagcagtgtgatgtggggattttctctgcgtttaaaactttaaaagttggtttacaatttgtctcagcattgatgactgagtgtacaatgaatgtcaccagtccattaatgttctgtatgggtaagtaggattccaatgaaatagaacttccaaatgaggaatatgaaataggttttacaaataaaataaaatacaattttaaaaaacaagtaaaagtgtttttaaggtggcccatataccagtttctctgcttaaaacagaattggcttttctgcatgacagcaaatctttgtttccttagagcagggtttcttgacagcagtgctattggcattttaaactggataattctttgttgtgatgggctttcctgtggactgtactatgttggtacacaagaaaaacagtgtactatgtgaatactcactcaaagccagtagcactccctgattgtaacaccaaaaaagtctctcagcattgccaaatgtcccctgtggcagcagaatcactccctgatgagaaccactaccctggagtaaaatctataactatgtcttagaaaataacacagaaaattaatatttctttcactctactccttccattagtgatcaaataaagaaggcatttggcgctacttgccaaattgttggctcaaacttgtgctgaaccttttttggttttctacacttaagtttttttgcctataacccagagaactttgaaaatagagtgtagttaatgtgtatctaatgttactttgtattgacttaattttcccgccttaaatccacagcataaaaaatcacatggaaaagacaaagaaaacagaggcattaacacactggagaggtctaaagtggaagaaactacagagcacttggttacaaagagcagattacctctgcgagcccagatcaacctttaattcacttgggggttggcaattttatttttaaagaaaacttaaaaataaaacctgaaaccccagaacttgagccttgtgtatagattttaaaagaatatatatatcagccgggcgcggtggctcatgcctgtaatcccagcactttgggaggctgaggcgggtggattgcttgagcccaggagtttgagaccagcctggccaacgtggcaaaacctcgtctctgttaaaaattagccgggcgtggtggcacactcctgtaatcccagctactggggaggctgaggcacgagaatcacttgaacccaggaagcggggttgcagtgagccaaaggtacaccactacactccagcctgggcaacagagcaagactcggtctcaaaaacaaaatttaaaaaagatataaggcagtactgtaaattcagttgaattttgatatctacccatttttctgtcatccctatagttcactttgtattaaattgggtttcatttgggatttgcaatgtaaatacgtatttctagttttcatataaagtagttcttttataacaaatgaaaagtatttttcttgtatattattaagtaatgaatatataagaactgtactcttctcagcttgagcttacataggtaaatatcaccaacatctgtccttagaaaggaccatctcatgttttttttcttgctatgacttgtgtattttcttgcatcctccctagacttccctatttcgctttctcctcggctcactttctccctttttatttttcaccaaaccatttgtagagctacaaaaggtatcctttcttattttcagtagtcagaattttatctagaaatcttttaacacctttttagtggttatttctaaaatcactgtcaacaataaatctaaccctagttgtatccctcctttcagtatttttcacttgttgccccaaatgtgaaagcatttcattcctttaagaggcctaactcattcaccctgacagagttcacaaaaagcccacttaagagtatacattgctattatgggagaccacccagacatctgactaatggctctgtgcccacactccaagacctgtgccttttagagaagctcacaatgatttaaggactgtttgaaacttccaattatgtctataatttatattcttttgtttacatgatgaaactttttgttgttgcttgtttgtatataatacaatgtgtacatgtatctttttctcgattcaaatcttaacccttaggactctggtatttttgatctggcaaccatatttctggaagttgagatgtttcagcttgaagaaccaaaacagaaggaatatgtacaaagaataaattttctgctcacgatgagtttagtgtgtaaagtttagagacatctgactttgatagctaaattaaaccaaaccctattgaagaattgaatatatgctacttcaagaaactaaattgatctcgtagaattatcttaataaaataatggctataatttctctgcaaaatcagatgtcagcataagcgatggataatacctaataaactgccctcagtaaatccatggttaataaatgtggtttctacattaacctgcttgctccataatttcttatctggcaatgggtatatttagagggttaggcaagctgcattcacattcccaaaataaactatgcaggtaccaccaaagaagaaggagcctagtaaacttgcaggcttttagttgcactccaaggggctatcctaggtgcaaggttagtgagaagtaggccctcacacagcctgaagtccagctttaagtcatctcattccatgactgtttaagttatctgagaatgctgatgcaactaatttcactgcctcacagaagcaaaaataaatctccagataattttaacatccagaaccataaattagctctaccaattttcatacacaatgtcgggccctcagaatgtaaccaagagtagcatcagcaaaaatggccaagtaggtagcttcaaggaccttttcctccacagaaacattgaaaaatcaagcaaaaacattcagaaacaactttgtcagaacccagga

SEQ ID NO: 485 - DNA, 20 bp, Artificial Sequence
  IDE-US-945 Forward-PCR Primer
ccactaggaggcttgccata

SEQ ID NO: 486 - DNA, 20 bp, Artificial Sequence
  IDE-US-945 Reverse-PCR Primer
ttgcacccacgaacaactta

SEQ ID NO: 487 - DNA, 22 bp, Artificial Sequence
  IDE-US-945 FP-SBE reverse primer
caaaaacggtgtccttagtcca

SEQ ID NO: 488 - DNA, 20 bp, Artificial Sequence
  IDE-US-122 Forward-PCR Primer
ccctcacagtcagacacacg

SEQ ID NO: 489 - DNA, 19 bp, Artificial Sequence
  IDE-US-122 Reverse-PCR Primer
agctgcggagaggtagctg

SEQ ID NO: 490 - DNA, 18 bp, Artificial Sequence
  IDE-US-122 FP-SBE forward primer
cctcggctgtccgcggtc

SEQ ID NO: 491 - DNA, 19 bp, Artificial Sequence
  IDE-1.e5 UTR-51 Forward-PCR Primer
agctacctctccgcagctc

SEQ ID NO: 492 - DNA, 20 bp, Artificial Sequence
  IDE-1.e5 UTR-51 Reverse-PCR Primer
cattccgcttacccacacag

SEQ ID NO: 493 - DNA, 18 bp, Artificial Sequence
  IDE-1.e5 UTR-51 FP-SBE forward primer
cagtgcgcagggccggct

SEQ ID NO: 494 - DNA, 20 bp, Artificial Sequence
  IDE-3i.D+42 Forward-PCR Primer
gtaggcctgaagcctcattt

SEQ ID NO: 495 - DNA, 20 bp, Artificial Sequence
  IDE-3i.D+42 Reverse-PCR Primer
catgaacacctagaaggtgc

SEQ ID NO: 496 - DNA, 25 bp, Artificial Sequence
  IDE-3i.D+42 FP-SBE forward primer
tgaattatccaactttgtgtactta

SEQ ID NO: 497 - DNA, 23 bp, Artificial Sequence
  IDE-20iD+249 Forward-PCR Primer
ttccacattttcacctaacactg

SEQ ID NO: 498 - DNA, 20 bp, Artificial Sequence
  IDE-20iD+249 Reverse-PCR Primer
tcctctggatggctcatttc

SEQ ID NO: 499 - DNA, 24 bp, Artificial Sequence
  IDE-20iD+249 FP-SBE forward primer
attacatacatgtcaataaagagg

SEQ ID NO: 500 - DNA, 20 bp, Artificial Sequence
  KNSL-US-7082 Forward-PCR Primer
cctgtgccagacctataccg

SEQ ID NO: 501 - DNA, 20 bp, Artificial Sequence
  KNSL-US-7082 Reverse-PCR Primer
ctcccaacttcaggtgatcc

SEQ ID NO: 502 - DNA, 23 bp, Artificial Sequence
  KNSL-US-7082 FP-SBE reverse primer
gctcagctatgaacagacataat

SEQ ID NO: 503 - DNA, 20 bp, Artificial Sequence
  KNSL-US-6097 Forward-PCR Primer
ggcattggtgtggaataagg

SEQ ID NO: 504 - DNA, 20 bp, Artificial Sequence
  KNSL-US-6097 Reverse-PCR Primer
caggagaactgcctgaacct

SEQ ID NO: 505 - DNA, 20 bp, Artificial Sequence
  KNSL-1i.A-4641 Forward-PCR Primer
aatggaagtggcaaaagtgg

SEQ ID NO: 506 - DNA, 20 bp, Artificial Sequence
  KNSL-1i.A-4641 Reverse-PCR Primer
aggatcagcatgggaaacat

SEQ ID NO: 507 - DNA, 20 bp, Artificial Sequence
  KNSL-13i.D+70 Forward-PCR Primer
cacaatgcagaagctcagga

SEQ ID NO: 508 - DNA, 25 bp, Artificial Sequence
  KNSL-13i.D+70 Reverse-PCR Primer
cagacagaaattaaccagacttgaa

SEQ ID NO: 509 - DNA, 24 bp, Primer
ctccagaacctccacagttagaac

SEQ ID NO: 510 - DNA, 24 bp, Artificial Sequence
  Primer
cgagaggcttgtaaattctccgtg

SEQ ID NO: 511 - DNA, 20 bp, Artificial Sequence
  Primer
cggctttgttccatccactg

SEQ ID NO: 512 - DNA, 20 bp, Artificial Sequence
  Primer
agaaaaacccctgcctgtag

SEQ ID NO: 513 - DNA, 24 bp, Artificial Sequence
  Primer
caagggggtctgaggcagtcttag

SEQ ID NO: 514 - DNA, 24 bp, Artificial Sequence
  Primer
ggagctggggccgccgcgcatccg

SEQ ID NO: 515 - DNA, 20 bp, Artificial Sequence
  Primer
tcctcagtccagacgctgtt

SEQ ID NO: 516 - DNA, 20 bp, Artificial Sequence
  Primer
cagcggaggggacccaacag

SEQ ID NO: 517 - DNA, 24 bp, Artificial Sequence
  Primer
gattcctcagtccagacgctgttg

SEQ ID NO: 518 - DNA, 24 bp, Artificial Sequence
  Primer
gggctctcatggtggcgaggtcgg

SEQ ID NO: 519 - DNA, 24 bp, Artificial Sequence
  Primer
gtgagtgccgcggtcctgagatcc

SEQ ID NO: 520 - DNA, 24 bp, Artificial Sequence
  Primer
cccaagcaagcttcatctaccaga

SEQ ID NO: 521 - DNA, 20 bp, Artificial Sequence
  Primer
ttgcagagccgccgtctagc

SEQ ID NO: 522 - DNA, 22 bp, Artificial Sequence
  Primer
ggaggaagaggccgccgggact

SEQ ID NO: 523 - DNA, 22 bp, Artificial Sequence
  Primer
tttgtgtggccactgtttcgtg

SEQ ID NO: 524 - DNA, 20 bp, Artificial Sequence
  Primer
catcccctccctgccctctg

SEQ ID NO: 525 - DNA, 20 bp, Artificial Sequence
  Primer
gagggcagggaggggatgtc

SEQ ID NO: 526 - DNA, 22 bp, Artificial Sequence
  Primer
ccagcctggacaacatggtgta

SEQ ID NO: 527 - DNA, 22 bp, Artificial Sequence
  Primer
actcttggacaagcggctttag

SEQ ID NO: 528 - DNA, 20 bp, Artificial Sequence
  Primer
gccctgcctgccctggaact

SEQ ID NO: 529 - DNA, 20 bp, Artificial Sequence
  Primer
ggtgtcagtgctggcctttc

SEQ ID NO: 530 - DNA, 24 bp, Artificial Sequence
  Primer
tctgccactgtccttcagcaaacg

SEQ ID NO: 531 - DNA, 24 bp, Artificial Sequence
  Primer
aattctcccccaataatcttaaag

SEQ ID NO: 532 - DNA, 20 bp, Artificial Sequence
  Primer
ctaaagccgcttgtccaaga

SEQ ID NO: 533 - DNA, 20 bp, Artificial Sequence
  Primer
ctcttggacaagcggcttta

SEQ ID NO: 534 - DNA, 24 bp, Artificial Sequence
  Primer
gagaagtgcggcctctggttgagt

SEQ ID NO: 535 - DNA, 24 bp, Artificial Sequence
  Primer
tagtcctccttctttgggtaatca

SEQ ID NO: 536 - DNA, 20 bp, Artificial Sequence
  Primer
ctcctacctgcctccctaag

SEQ ID NO: 537 - DNA, 20 bp, Artificial Sequence
  Primer
agggctggttctcgatggtg

SEQ ID NO: 538 - DNA, 24 bp, Artificial Sequence
  Primer
ggccctgggtttctcctcttcgac

SEQ ID NO: 539 - DNA, 24 bp, Artificial Sequence
  Primer
aggctccattctccaagttctata

SEQ ID NO: 540 - DNA, 20 bp, Artificial Sequence
  Primer
ctgacacgcttgctcaccac

SEQ ID NO: 541 - DNA, 20 bp, Artificial Sequence
  Primer
cactctccccaagccattat

SEQ ID NO: 542 - DNA, 24 bp, Artificial Sequence
  Primer
atggattccagcctaactacctca

SEQ ID NO: 543 - DNA, 24 bp, Artificial Sequence
  Primer
gtctgccagagaggggaaccataa

SEQ ID NO: 544 - DNA, 20 bp, Artificial Sequence
  Primer
cctgccctcgatgtataacg

SEQ ID NO: 545 - DNA, 20 bp, Artificial Sequence
  Primer
aaactggggatcgttataca

SEQ ID NO: 546 - DNA, 24 bp, Artificial Sequence
  Primer
gaagagtgttgtttagggagcgat

SEQ ID NO: 547 - DNA, 24 bp, Artificial Sequence
  Primer
acaccctgggcactgagttacatt

SEQ ID NO: 548 - DNA, 20 bp, Artificial Sequence
  Primer
ttcctgccaggtgagtgttc

SEQ ID NO: 549 - DNA, 20 bp, Artificial Sequence
  Primer
tctggggagatatggaagag

SEQ ID NO: 550 - DNA, 24 bp, Artificial Sequence
  Primer
ctaatcaggaggctgagacatggg

SEQ ID NO: 551 - DNA, 24 bp, Artificial Sequence
  Primer
cttcagtccagaaaaagacaagtt

SEQ ID NO: 552 - DNA, 20 bp, Artificial Sequence
  Primer
gccgtggatgtgccctgaag

SEQ ID NO: 553 - DNA, 20 bp, Artificial Sequence
  Primer
tcgtgtagacgcctggcttg

SEQ ID NO: 554 - DNA, 24 bp, Artificial Sequence
  Primer
ccacccgctttcttgctggttgtc

SEQ ID NO: 555 - DNA, 24 bp, Artificial Sequence
  Primer
tacctcccaaagctccattaagtc

SEQ ID NO: 556 - DNA, 20 bp, Artificial Sequence
  Primer
cgacggtgggcatttgtgag

SEQ ID NO: 557 - DNA, 20 bp, Artificial Sequence
  Primer
gacccaagaggccccaggag

SEQ ID NO: 558 - DNA, 20 bp, Artificial Sequence
  Primer
cctcacaaatgcccaccgtc

SEQ ID NO: 559 - DNA, 8315 bp, Homo sapiens
  ref <308>: DATABASE ACCESSION NUMBER: GenBank #AF377330
  ref <309>: DATABASE ENTRY DATE: 2001-06-01
tgtcctccagtctcccaattcctctactcagaggtgagaacagaacttccacaccctccagaacctccacagttagaactgtctacatgtttccattgtctttacttttattcttgcctgcacaaataaatgaattgctcattatggaaacttcccaaaagacccgttaacacttcaataggaagcaccaacagtttatgccctaggactttgttcccacaatcctgtaacatcatatcacgacacctaacccaatccttatcaagccctgtcaaaaacggactttaaaccaagctgcaaattttcagtaatctggccttgcctttccccctctgatagcaccatcaaacaaacccccttactgccgaaagcaataagcccggctttgttccatccactggttgtgttggtgatatctggggactgccactgaacagacgcacagagggagcccctacaggcagggggtttttctgtctgtgcttctgggagagtatgtctcgtacatttgtcgcgttgatgaagacttcacagctccatcagctgcgggcaagggggtctgaggcagtcttaggcaagttggggcccagcggggagaagttgcagaagaactgattagaggaccccaggaggcttcagagctgggcgaggtagagagtctcctgtgcgccttctctcctctctgcaattcggggactccttgcactggggcaggcccccggccaggtgcatgggaggaagcacggagaatttacaagcctctcgattcctcagtccagacgctgttgggtcccctccgctggagatcgcgcttcccccaaatctttgtgagcgttgcggaagcacgcggggtccgggtcgctgagcgctgcaagacaggggagggagccgggcgggagagggaggggcggcgccggggcgggccctgatatagagcaggcgccgcgggtcgcagcacagtgcggagaccgcagccccggagcccgggccagggtccacctgtccccgcagcgccggctcgcgccctcctgccgcagccaccggtgagtgccgcggtcctgagatccccgggccggatgcgcggcggccccagctcccgagcgtctgcctcccccgccctgggctgcccgggctccctgggctccccggcggctgcacggagtcaaggcgccccgtcccgggcgtcccccgcgggtgccgatccaggctgcccggagtccggagcccagagaggagagagacagctggggagcctggtcaccgcgggcatctcccctgcgctgcagtcgcccgcctggcctgccttcccgttcctccgcctcttgccctgacttctccttcctttgcagagccgccgtctagcgccccgacctcgccaccatgagagccctgctggcgcgcctgcttctctgcgtcctggtcgtgagcgactccaaagtgagtgcgctcttgctttgactgatgctgcccaaggacctctgatcagcaccaggggagaggaggggctgctcagggagctggggtcctccggattccatccacagcagggccagactctccccaggaaatgggacagggtggcagcggaggcttgagaaccacgggggttggcactggctggcaagggaggaagaggccgccgggactgccccagcctgcgggcatctggtagatgaagcttgcttgggtcaatccatttctcctggctggaaacccatggtcttccatttgagaactagatacgaacagggtgaggcgagagggagagggaagagtgggttttgggattggggccagtttaccctcaccctggagtccctggagcatgggacctttgatgaagcctcctcccgaatctcttccagggcagcaatgaacttcatcaagttccatgtgagtatccacccctacaacagttggctgcacagacaagttgggaaggcttcaggggacatcccctccctgccctctgctgcagggctgcgccaccccttaccacttccactccccctcgcttaccccacctttgttctctccagcgaactgtgactgtctaaatggaggaacatgtgtgtccaacaagtacttctccaacattcactggtgcaactgcccaaagaaattcggagggcagcactgtgaaataggtatggggatctccactgcaactgggagagaaatttggggacagggagggatgggtgggaggcaagagcaggcaggagttaggagctggaggtagggtgggtgacatcttcatccctatgtgacaagcataaacacacacacacgctcacgaaacagtggccacacaaatgtgaggtggggttggaaggagaccctgtccagtcttctggcaggtctgaaacgacatctttaaaatgtccgttggcagccgggcatggtggctcacgcttgtaatcccagcattttgagaggtcaagtttgagtggatcatttgaggtcaggagttcaagaccagcctggacaacatggtgtaaccctgcctctactaaaaatgcaaaaatcagcctggcatggtggtggatgcctgtagtcccagctacttgggaggctgaggcaggagaattgcttgaacctgggaggcagagatctcagtgagctgagatcacaccactgcactccaactgggcgacagagcaagactccatctcaaaaaaaaaaaataaaagttagttggaatgttcttctctttctcatattctctcatcctcctgtccccttgtagataagtcaaaaacctgctatgaggggaatggtcacttttaccgaggaaaggccagcactgacaccatgggccggccctgcctgccctggaactctgccactgtccttcagcaaacgtaccatgcccacagatctgatgctcttcagctgggcctggggaaacataattactgcaggtgaggtgggggcaacaaggaccaaaagccctccctacagcttcccagaaaccttgttaccatccccttctcccagagggctggccatagcacaagagaagtgcggcctctggttgagtcttccctgaggggaggaggcagggaaggccctctgggttggaatgacatcccctatctttctgtgttgccaggaacccagacaaccggaggcgaccctggtgctatgtgcaggtgggcctaaagccgcttgtccaagagtgcatggtgcatgactgcgcagatggtgagcatcactgacctgctgatgacagtggggtggaaggggacaaacttacatgtccccttattccatcacaggaggactgaggaggtggggggtgcccgagagggatgctttctcctacctgcctccctaagacatccctctgtttgtcctccaggaaaaaagccctcctctcctccagaagaattaaaatttcagtgtggccaaaagactctgaggccccgctttaagattattgggggagaattcaccaccatcgagaaccagccctggtttgcggccatctacaggaggcaccgggggggctctgtcacctacgtgtgtggaggcagcctcatcagcccttgctgggtgatcagcgccacacactgcttcatgtacggccctgggtttctcctcttcgactcttctgccccaccccaagcacatccctttctccttcccagcaaagtgttccgcctcatttctccctcatctgcccctgtccatgcagcccatggccttggggacaagtcgtgctttgaggcctctagggagggaaggaagaagtggcagatttcatgggactaagctgtttgatgggtatcttcttccacagtgattacccaaagaaggaggactacatcgtctacctgggtcgctcaaggcttaactccaacacgcaaggggagatgaagtttgaggtggaaaacctcatcctacacaaggactacagcgctgacacgcttgctcaccacaacgacattggtgagggggaaccccgcgactactgtggccataatggcttggggagagtgggacccagggagagactggagctgaggttgaagctgcccggtggggcaggggtggggcgagggaccttgaagcctcgatatacatgacaaagggagtggcagggaagagttccatgaagtctgaggggcctggtgctcctctggagagaccctgaatttccccaacaagtagcctcttgcgagtggaaacagccctgtgggtatatggcttgggctgggaaggccctgtttatatgaattagaaaaagacacaccttcctttgtgggatgcagcctctgtctgtgctaggatatagaacttggagaatggagccttgggatggattccagcctaactacctcagctgggagtttttgcagaaacgacctgtacagctgtatgcagtggctctggccatccaagcctttttcaacacctggaacaaagcccttggggcatggggcaggggaggtttccaggtgataagcgaccagcagacctccctggatgactgacctagggataggcatagctacttcctcggcacttggaggggacagatggggaccgcctaaccagtagtgatctttctcctctgaccctctgtcctcccccagccttgctgaagatccgttccaaggagggcaggtgtgcgcagccatcccggactatacagaccatctgcctgccctcgatgtataacgatccccagtttggcacaagctgtgagatcactggctttggaaaagagaattctagtaagtgacaattgcgactgacttagaaggtcctgaggagtgttttgacctgaaaatgagcccagcgtgatcaagggaagactgcagagttagaggtgggagcactgaggcggtggcagatgggtccagggatggatgaagagtgttgtttagggagcgatgggctgcaaaggtaaatagatggtaggggctataggtggagtaaaggctcagatttgcatggaagagaataagggccttccctggtagagatactttatggttcccctctctggcagactcccagtggacagataaatcttgatgcaaacgcctccctgttttctccacctagccgactatctctatccggagcagctgaaaatgactgttgtgaagctgatttcccaccgggagtgtcagcagccccactactacggctctgaagtcaccaccaaaatgctgtgtgctgctgacccacagtggaaaacagattcctgccaggtgagtgttccaagcatctctctccacctcttccatatctccccagagctcctgggcttgttccagccagcttaagggtgtctctctctagccaaagccctaagtagccagaatcaggagctcaggtctttgagggtttaaaccagtccttatgtgtttgccagacattaccaaaaaaatcccagctctgcgctagtcacttcagactgggggcacgagatcctagaaagaggaaacagtaaaagacaatgtaactcagtgcccagggtgtgttgtgaactataaatgatcaggtgttcaggagagggaggtgagtgccaacctgagggtcagggaggggaggctttaaaggaaatgtgacttgataggcatttgaagaggcagagggaagaaaggaaggtgtttcagttgaaagatacaaaactgagaaggaggctggcatattccgggtggggaggagaactagggtctgggagtgtggatggaatagtggcagatgacagggcttttaaagccaagcaggggattttaaacttgatgtggtagaaaatggggctgcgtcaggcacagtggctcatgcctgtaatcccagcactttgggaggccgaggtggatggatcacttgaggccaggagtttgagaccggcctggccaacatggtgaaaccctgtgtctactaaaaatgcaaaaaaaaattagccaggtgtggtggtgcctgcctgtaatcccagctaatcaggaggctgagacatgggaatcgcttgagcacaggaggcaagtttgcagtgagctgagatcacgtcattgcacgccagcctgggcgacagagcgagattctgtcctccccccgaaaaaaagaaagaaaatgggaagtcgctaaggactttgactgggaaactcttccctctctctggtatggttgggtgatgggatcagaaatcccctcctcacttctctagggctcatcttttgtatctttggcgtcacagggagactcagggggacccctcgtctgttccctccaaggccgcatgactttgactggaattgtgagctggggccgtggatgtgccctgaaggacaagccaggcgtctacacgagagtctcacacttcttaccctggatccgcagtcacaccaaggaagagaatggcctggccctctgagggtccccagggaggaaacgggcaccacccgctttcttgctggttgtcatttttgcagtagagtcatctccatcagctgtaagaagagactgggaagataggctctgcacagatggatttgcctgtgccacccaccagggtgaacgacaatagctttaccctcaggcataggcctgggtgctggctgcccagacccctctggccaggatggaggggtggtcctgactcaacatgttactgaccagcaacttgtctttttctggactgaagcctgcaggagttaaaaagggcagggcatctcctgtgcatgggtgaagggagagccagctcccccgacggtgggcatttgtgaggcccatggttgagaaatgaataatttcccaattaggaagtgtaacagctgaggtctcttgagggagcttagccaatgtgggagcagcggtttggggagcagagacactaacgacttcagggcagggctctgatattccatgaatgtatcaggaaatatatatgtgtgtgtatgtttgcacacttgtgtgtgggctgtgagtgtaagtgtgagtaagagctggtgtctgattgttaagtctaaatatttccttaaactgtgtggactgtgatgccacacagagtggtctttctggagaggttataggtcactcctggggcctcttgggtcccccacgtgacagtgcctgggaatgtattattctgcagcatgacctgtgaccagcactgtctcagtttcactttcacatagatgtccctttcttggccagttatcccttccttttagcctagttcatccaatcctcactgggtggggtgaggaccactcctgtacactgaatatttatatttcactatttttatttatatttttgtaattttaaataaaagtgatcaataaaatgtgatttttctgatgacaaatctccctggtgcttgtatgggaaggagttggagtacataaaaaggagaaaataacaaaggtggactgcaccctagagtttcttatgggactgcatctctggacttaatggagctttgggaggtagaggttaggagagctgtagggcagggccaccacagcacttaatgtatacaaagtttccccaaaccacaatcccatggctgtgtaagtagtgtacaggcttagtgtcagctcccaattgcctccttaacctgatgcctttgtgcagtgcacatcttgtacagctgtacatggtggtcttctttagggttaactccacaacagtctcttcactctgcccccaacaatccttgagctgacctcaaccaagaagaacacctgtggccaggtgtagtggctcatgcctgtaatcctaacattttgagaggctgaggtgggagaatcgcttgagcccaggagtttgagaccagcctgggaaacttagtgagaccctgtctctgcaaaaaataaaaaaattagccaggtgtggtagcacatgtctgtagtcctagctacttgggaggctgaggcaggaggatcataagccaaggagttcaagtttacagtcagctgattgtgccactgcactccagcctaggtgacagagcaagaccctgtctcaaaaaaaaaaaaagaagaagaagaagaagaagacctgtaagtgaaaattgctggccaggctcagtggctcacgcctgtaatccagcactttgggaagccgaggtgtgtggatcacctgaggtcaggagtttgagaccagcctgaccaacatagtgaaaccccatctctactaaaaatacaaaaaaattagccgggtgtgggggtgggtgcctgtaatcccagctactcgggaggctgaggcaggagaatcatttgaacccgggaggcagaggttgcagtgagccgagatcgcaccactgcactccagcctgggcgacagagggaaga

SEQ ID NO: 560 - DNA, 8315 bp, Homo sapiens
  allele 178, 401, 515, 748, 1229, 1356, 1363, 1423, 1465, 1540, 1752,1942, 2127, 2297, 2445, 2543, 2653, 3029, 3080, 3169, 3546,3664, 3799, 3816, 3947, 4320, 4369, 4399, 4808, 4851, 5186,5204, 5287, 5787, 6519, 6532, 6909, 7848, 7908: n = A,T,C or G
  allele 464: deletion: G
  allele 7235: deletion: G
tgtcctccagtctcccaattcctctactcagaggtgagaacagaacttccacaccctccagaacctccacagttagaactgtctacatgtttccattgtctttacttttattcttgcctgcacaaataaatgaattgctcattatggaaacttcccaaaagacccgttaacacttcantaggaagcaccaacagtttatgccctaggactttgttcccacaatcctgtaacatcatatcacgacacctaacccaatccttatcaagccctgtcaaaaacggactttaaaccaagctgcaaattttcagtaatctggccttgcctttccccctctgatagcaccatcaaacaaacccccttactgccgaaagcaataagcccggctttgttccatccactgnttgtgttggtgatatctggggactgccactgaacagacgcacagagggagcccctacaggcagggggtttttctgtctgtgcttctgggagagtatgtctcgtacatttgtcgngttgatgaagacttcacagctccatcagctgcgggcaagggggtctgaggcagtcttaggcaagttggggcccagcggggagaagttgcagaagaactgattagaggaccccaggaggcttcagagctgggcgaggtagagagtctcctgtgcgccttctctcctctctgcaattcggggactccttgcactggggcaggcccccggccaggtgcatgggaggaagcacgganaatttacaagcctctcgattcctcagtccagacgctgttgggtcccctccgctggagatcgcgcttcccccaaatctttgtgagcgttgcggaagcacgcggggtccgggtcgctgagcgctgcaagacaggggagggagccgggcgggagagggaggggcggcgccggggcgggccctgatatagagcaggcgccgcgggtcgcagcacagtgcggagaccgcagccccggagcccgggccagggtccacctgtccccgcagcgccggctcgcgccctcctgccgcagccaccggtgagtgccgcggtcctgagatccccgggccggatgcgcggcggccccagctcccgagcgtctgcctcccccgccctgggctgcccgggctccctgggctccccggcggctgcacggagtcaaggcgccccgtcccgggcgtcccccgcgggtgccgatccaggctgcccggagtccggagcccanagaggagagagacagctggggagcctggtcaccgcgggcatctcccctgcgctgcagtcgcccgcctggcctgccttcccgttcctccgcctcttgccctgacttctccttcctttgcagagccgcngtctagngccccgacctcgccaccatgagagccctgctggcgcgcctgcttctctgcgtcctggtcntgagcgactccaaagtgagtgcgctcttgctttgactgatgntgcccaaggacctctgatcagcaccaggggagaggaggggctgctcagggagctggggtcctccggattccatcnacagcagggccagactctccccaggaaatgggacagggtggcagcggaggcttgagaaccacgggggttggcactggctggcaagggaggaagaggccgccgggactgccccagcctgcgggcatctggtagatgaagcttgcttgggtcaatccatttctcctggctggaaacccatggtcttccatttgagaactagatacgaacagggngaggcgagagggagagggaagagtgggttttgggattggggccagtttaccctcaccctggagtccctggagcatgggacctttgatgaagcctcctcccgaatctcttccagggcagcaatgaacttcatcaagttccatgtgagtatccacccctacaacagttggctgcacagacaagttgggaagncttcaggggacatcccctccctgccctctgctgcagggctgcgccaccccttaccacttccactccccctcgcttaccccacctttgttctctccagcgaactgtgactgtctaaatggaggaacatgtgtgtccaacaagtacttctccaacattcactggtgcaactgcccaaagaaattcgnagggcagcactgtgaaataggtatggggatctccactgcaactgggagagaaatttggggacagggagggatgggtgggaggcaagagcaggcaggagttaggagctggaggtagggtgggtgacatcttcatccctatgtgacaagcataaacacacacacacgctcangaaacagtggccacacaaatgtgaggtggggttggaaggagaccctgtccagtcttctggcaggtctgaaacgacatctttaaaatgtccgttggcagccgggcatggtggctcacgcttgtaatcccagcattttgagaggtcaagnttgagtggatcatttgaggtcaggagttcaagaccagcctggacaacatggtgtaaccctgcctctactaaaaatgcaaaaatcagcctggcatggtngtggatgcctgtagtcccagctacttgggaggctgaggcaggagaattgcttgaacctgggaggcagagatctcagtgagctgagatcacaccactgcactccaactggncgacagagcaagactccatctcaaaaaaaaaaaataaaagttagttggaatgttcttctctttctcatattctctcatcctcctgtccccttgtagataagtcaaaaacctgctatgaggggaatggtcacttttaccgaggaaaggccagcactgacaccatgggccggccctgcctgccctggaactctgccactgtccttcagcaaacgtaccatgcccacagatctgatgctcttcagctgggcctggggaaacataattactgcaggtgaggtgggggcaacaaggaccaaaagccctccctacagcttcccagaaaccttgttaccatccccttctcccagagggctggccatagcacaagagaagtgcngcctctggttgagtcttccctgaggggaggaggcagggaaggccctctggnttggaatgacatcccctatctttctgtgttgccaggaacccagacaaccggaggcgaccctggtgctatgtgcaggtgggcctaaagcngcttgtccaagagtgcatggtgcatgactgcgcagatggtgagcatcactgacctgctgatgacagtggggtggaaggggacaaacttacatgtccccttattccatcacaggaggactgaggaggtggggggtgcccgagagggatgctttctcctacctgcctccctaagacatccctctgtttgtcctccaggaaaaaagccctcctctcctccagaagaattaaaatttcagtgtggccaaaagactctgaggccccgctttaagattattgggggagaattcaccaccatcgagaaccagccctggtttgcggccatctacaggaggcaccgggggggctctgtcacctacgtgtgtggaggcagcctcatnagcccttgctgggtgatcagcgccacacactgcttcatgtacggccctgggtttctcctcttcgactcttctgccccaccccaagcacatccctttctccttcccagcaaagtgttcngcctcatttctccctcatctgcccctgtccatgcagcccatggccttggggacaagtcgtgctttgaggcctctagggagggaaggaagaagtggcagatttcatgggactaagctgtttgatgggtatcttctnccacagtgattacccanagaaggaggactacatcgtctacctgggtcgctcaaggcttaactccaacacgcaaggggagatgaagtttgaggtggaaaacctcatcctacacaaggactacagcgctgacacgcttgctcaccacaangacattggtgagggggaaccccgcgactactgtggccataatggcttggggagagtgggacccagggagagactggagctgaggttgaagctgcccggtggggcaggggtggggcgagggaccttgaagcctcgatatacatgacaaagggagtggcagggaagagttccatgaagtctgaggggcctggtgctcctctggagagaccctgaatttccccaacaagtagcctcttgcgagtggaaacagccctgtgggtatatggcttgggctgggaaggccctgtttatatgaattagaaaaagacacaccttcctttgtgggatgcagcctctgtctgtgctaggatatagaacttggagaatggagcctngggatggattccagcctaactacctcagctgggagtttttgcagaaacnacctgtacagctgtatgcagtggctctggncatccaagcctttttcaacacctggaacaaagcccttggggcatggggcaggggaggtttccaggtgataagcgaccagcagacctccctggatgactgacctagggataggcatagctacttcctcggcacttggaggggacagatggggaccgcctaaccagtagtgatctttctcctctgaccctctgtcctcccccagccttgctgaagatccgttccaaggagggcaggtgtgcgcagccatcccggactatacagaccatctgcctgccctcgatgtataacgatccccagtttggcacaagctgtgagatcactggctttggaaaagagaattctagtaagtgacaattgcgactgacttagaaggtcctgaggagtgttttgacctgaaaatgagcccagngtgatcaagggaagactgcagagttagaggtgggagcactgangcggtggcagatgggtccagggatggatgaagagtgttgtttagggagcgatgggctgcaaaggtaaatagatggtaggggctataggtggagtaaaggctcagatttgcatggaagagaataagggccttccctggtagagatactttatggttcccctctctggcagactcccagtggacagataaatcttgatgcaaacgcctccctgttttctccacctagccgactatctctatccggagcagctgaaaatgactgttgtgaagctgatttcccaccgggagtgtcagcagccccactactacggctctgaagtcaccaccaaaatgctntgtgctgctgacccacantggaaaacagattcctgccaggtgagtgttccaagcatctctctccacctcttccatatctccccagagctcctgggcttgtnccagccagcttaagggtgtctctctctagccaaagccctaagtagccagaatcaggagctcaggtctttgagggtttaaaccagtccttatgtgtttgccagacattaccaaaaaaatcccagctctgcgctagtcacttcagactgggggcacgagatcctagaaagaggaaacagtaaaagacaatgtaactcagtgcccagggtgtgttgtgaactataaatgatcaggtgttcaggagagggaggtgagtgccaacctgagggtcagggaggggaggctttaaaggaaatgtgacttgataggcatttgaagaggcagagggaagaaaggaaggtgtttcagttgaaagatacaaaactgagaaggaggctggcatattccgggtggggaggagaactagggtctgggagtgtggatggaatagtggcagatgacagggcttttaaagccaagcaggggattttaaacttgatgtggtagaaaatggggctgcgtnaggcacagtggctcatgcctgtaatcccagcactttgggaggccgaggtggatggatcacttgaggccaggagtttgagaccggcctggccaacatggtgaaaccctgtgtctactaaaaatgcaaaaaaaaattagccaggtgtggtggtgcctgcctgtaatcccagctaatcaggaggctgagacatgggaatcgcttgagcacaggaggcaagtttgcagtgagctgagatcacgtcattgcacgccagcctgggcgacagagcgagattctgtcctccccccgaaaaaaagaaagaaaatgggaagtcgctaaggactttgactgggaaactcttccctctctctggtatggttgggtgatgggatcagaaatcccctcctcacttctctagggctcatcttttgtatctttggcgtcacagggagactcagggggacccctcgtctgttccctccaaggccgcatgactttgactggaattgtgagctggggccgtggatgtgccctgaaggacaagccaggcgtctacacgagagtctcacacttcttaccctggatccgcagtcacaccaaggaagagaatggcctggccctctgagggtccccagggaggaaacgggcaccacccgctttcttgctggttgtcatttttgcagtagagtcatctccatcagctgtaagaagagactgggaagataggctctgcacagatggatttgcctgtgncacccaccagggngaacgacaatagctttaccctcaggcataggcctgggtgctggctgcccagacccctctggccaggatggaggggtggtcctgactcaacatgttactgaccagcaacttgtctttttctggactgaagcctgcaggagttaaaaagggcagggcatctcctgtgcatgggtgaagggagagccagctcccccgacggtgggcatttgtgaggcccatggttgagaaatgaataatttcccaattaggaagtgtaacagctgaggtctcttgagggagcttagccaatgtgggagcagcggtttggggagcagagacactaacgacttcagggcagggctctgatattccatgaatgtatcaggaaatatatatgtntgtgtatgtttgcacacttgtgtgtgggctgtgagtgtaagtgtgagtaagagctggtgtctgattgttaagtctaaatatttccttaaactgtgtggactgtgatgccacacagagtggtctttctggagaggttataggtcactcctggggcctcttgggtcccccacgtgacagtgcctgggaatgtattattctgcagcatgacctgtgaccagcactgtctcagtttcactttcacatagatgtccctttcttggccagttatcccttccttttagcctagttcatccaatcctcactgggtggggtgaggaccactcctgtacactgaatatttatatttcactatttttatttatatttttgtaattttaaataaaagtgatcaataaaatgtgatttttctgatgacaaatctccctggtgcttgtatgggaaggagttggagtacataaaaaggagaaaataacaaaggtggactgcaccctagagtttcttatgggactgcatctctggacttaatggagctttgggaggtagaggttaggagagctgtagggcagggccaccacagcacttaatgtatacaaagtttccccaaaccacaatcccatggctgtgtaagtagtgtacaggcttagtgtcagctcccaattgcctccttaacctgatgcctttgtgcagtgcacatcttgtacagctgtacatggtggtcttctttagggttaactccacaacagtctcttcactctgcccccaacaatccttgagctgacctcaaccaagaagaacacctgtggccaggtgtagtggctcatgcctgtaatcctaacattttgagaggctgaggtgggagaatcgcttgagcccaggagtttgagaccagcctgggaaacttagtgagaccctgtctctgcaaaaaataaaaaaattagncaggtgtggtagcacatgtctgtagtcctagctacttgggaggctgaggcaggaggatcntaagccaaggagttcaagtttacagtcagctgattgtgccactgcactccagcctaggtgacagagcaagaccctgtctcaaaaaaaaaaaaagaagaagaagaagaagaagacctgtaagtgaaaattgctggccaggctcagtggctcacgcctgtaatccagcactttgggaagccgaggtgtgtggatcacctgaggtcaggagtttgagaccagcctgaccaacatagtgaaaccccatctctactaaaaatacaaaaaaattagccgggtgtgggggtgggtgcctgtaatcccagctactcgggaggctgaggcaggagaatcatttgaacccgggaggcagaggttgcagtgagccgagatcgcaccactgcactccagcctgggcgacagagggaaga

SEQ ID NO: 561 - DNA, 2304 bp, Homo sapiens
  CDS (77)...(1372): PLAU cDNA
  allele 49, 59, 119, 249, 498, 718, 767, 898, 1156, 1174, 1500, 1512,1892, 2220: n = A,T,C or G
gtccccgcagcgccgtcgcgccctcctgccgcaggccaccgaggccgcngccgtctagngccccgacctcgccaccatgagagccctgctggcgcgcctgcttctctgcgtcctggtcntgagcgactccaaaggcagcaatgaacttcatcaagttccatcgaactgtgactgtctaaatggaggaacatgtgtgtccaacaagtacttctccaacattcactggtgcaactgcccaaagaaattcgnagggcagcactgtgaaatagataagtcaaaaacctgctatgaggggaatggtcacttttaccgaggaaaggccagcactgacaccatgggccggccctgcctgccctggaactctgccactgtccttcagcaaacgtaccatgcccacagatctgatgctcttcagctgggcctggggaaacataattactgcaggaacccagacaaccggaggcgaccctggtgctatgtgcaggtgggcctaaagcngcttgtccaagagtgcatggtgcatgactgcgcagatggaaaaaagccctcctctcctccagaagaattaaaatttcagtgtggccaaaagactctgaggccccgctttaagattattgggggagaattcaccaccatcgagaaccagccctggtttgcggccatctacaggaggcaccgggggggctctgtcacctacgtgtgtggaggcagcctcatnagcccttgctgggtgatcagcgccacacactgcttcattgattacccanagaaggaggactacatcgtctacctgggtcgctcaaggcttaactccaacacgcaaggggagatgaagtttgaggtggaaaacctcatcctacacaaggactacagcgctgacacgcttgctcaccacaangacattgccttgctgaagatccgttccaaggagggcaggtgtgcgcagccatcccggactatacagaccatctgcctgccctcgatgtataacgatccccagtttggcacaagctgtgagatcactggctttggaaaagagaattctaccgactatctctatccggagcagctgaaaatgactgttgtgaagctgatttcccaccgggagtgtcagcagccccactactacggctctgaagtcaccaccaaaatgctntgtgctgctgacccccantggaaaacagattcctgccagggagactcagggggacccctcgtctgttccctccaaggccgcatgactttgactggaattgtgagctggggccgtggatgtgccctgaaggacaagccaggcgtctacacgagagtctcacacttcttaccctggatccgcagtcacaccaaggaagagaatggcctggccctctgagggtccccagggaggaaacgggcaccacccgctttcttgctggttgtcatttttgcagtagagtcatctccatcagctgtaagaagagactgggaagataggctctgcacagatggatttgcctgtgncaccaccagggngaacgacaatagctttaccctcacggataggcctgggtgctggctgcccagaccctctggccaggatggaggggtggtcctgactcaacatgttactgaccagcaacttgtctttttctggactgaagcctgcaggagttaaaaagggcagggcatctcctgtgcatgggctcgaagggagagccagctcccccgaccggtgggcatttgtgaggcccatggttgagaaatgaataatttcccaattaggaagtgtaagcagctgaggtctcttgagggagcttagccaatgtgggagcagcggtttggggagcagagacactaacgacttcagggcagggctctgatattccatgaatgtatcaggaaatatatatgtntgtgtatgtttgcacacttgttgtgtgggctgtgagtgtaagtgtgagtaagagctggtgtctgattgttaagtctaaatatttccttaaactgtgtggactgtgatgccacacagagtggtctttctggagaggttataggtcactcctggggcctcttgggtcccccacgtgacagtgcctgggaatgtacttattctgcagcatgacctgtgaccagcactgtctcagtttcactttcacatagatgtccctttcttggccagttatcccttccttttagcctagttcatccaatcctcactgggtggggtgaggaccactcctnacactgaatatttatatttcactatttttatttatatttttgtaattttaaataaaagtgatcaataaaatgtgatttttctga

SEQ ID NO: 562 - protein, 431 aa, Homo sapiens
  VARIANT 15, 58, 141, 214, 231, 274, 366: Xaa = Any Amino Acid
MRALLARLLLCVLVXSDSKGSNELHQVPSNCDCLNGGTCVSNKYFSNIHWCNCPKKFXGQHCEIDKSKTCYEGNGHFYRGKASTDTMGRPCLPWNSATVLQQTYHAHRSDALQLGLGKHNYCRNPDNRRRPWCYVQVGLKXLVQECMVHDCADGKKPSSPPEELKFQCGQKTLRPRFKIIGGEFTTIENQPWFAAIYRRHRGGSVTYVCGGSLXSPCWVISATHCFIDYPXKEDYIVYLGRSRLNSNTQGEMKFEVENLILHKDYSADTLAHHXDIALLKIRSKEGRCAQPSRTIQTICLPSMYNDPQFGTSCEITGFGKENSTDYLYPEQLKMTVVKLISHRECQQPHYYGSEVTTKMLCAADPXWKTDSCQGDSGGPLVCSLQGRMTLTGIVSWGRGCALKDKPGVYTRVSHFLPWIRSHTKEENGLAL

SEQ ID NO: 563 - DNA, 2000 bp, Homo sapiens
agcaatcagcatgacagcctccagccaagtaatctggagtcatgagagcttcgttagtcgtactgtcggaggtcggttcattagacctcagtactctcgagctaggggagcaacatgaatcatgacggtccctgggaatttcctgataaccgatcccctcgttgtacttagtactgccagggacccttaaaggactattgtaacctgggagtttcggggtaagtcctcaggctgcagcatctctgtttatattggaccctcaaagccccattcaggagtccgacgtcgtagagacaaatagttctggtcacgtttatttacaattaatgggttctcaaatccaaacaaaacaagaccagtgcaaataaatgttaattacccaagagtttaggtttgttttctgaccacagtcttctagaggaagtagcaaggttggctctgaagcctatagactggtgtcagaagatctccttcatcgttccaaccgagacttcggatatgcatcgctgactcagtctgtcccctggaaggctggcagctcagcaagcaccgtagcgactgagtcagacaggggaccttccgaccgtcgagtcgttcgtgagaagtctctccagaagacagtgggtcacctgcctcccaaaagctgaaagtcttcagagaggtcttctgtcacccagtggacggagggttttcgactttcgctaacttgtactttccccagcaggcagctggcaccctgagccctcggctcgattgaacatgaaaggggtcgtccgtcgaccgtgggactcgggagccgaggggcagagcaaaggagccttcctccttcctaccttcctggcactctcccccccgtctcgtttcctcggaaggaggaaggatggaaggaccgtgagagggtgccttccttctgtcactctcaggtggacccagacccaaggtccagatttacggaaggaagacagtgagagtccacctgggtctgggttccaggtctaaagcaaggcaggaaaatgctgcaggcctaggctgggaaagggcccaaagccgcgttccgtccttttacgacgtccggatccgaccctttcccgggtttcggcctagtggattgctgggactcagcctcctccttcccactaagagagcgagtgatcacctaacgaccctgagtcggaggaggaagggtgattctctcgctcacctactgggttcaaaatgaccccaagccctggttcctgacactaggggaaggatgacccaagttttactggggttcgggaccaaggactgtgatccccttagagatgggggtgacagaatcacagaatccctgctatgttcctccaagtgtctctacccccactgtcttagtgtcttagggacgatacaaggaggttcactgcccagagatgcgtgtgtgtgtgtgtgtgtatacacaaatgtctgcttaacgggtctctacgcacacacacacacacacatatgtgtttacagacgaattcctcaggcaggaagggtggatgcagtcatttacacatggtctgtttttcaggagtccgtccttcccacctacgtcagtaaatgtgtaccagacaaaaagtggaggacaattttatttgataaacaattgtttctatctgaatagaataaacctcctgttaaaataaactatttgttaacaaagatagacttatcttattacaaggctctatgatgaagtaaaacactaaatacacatgcattaaaaaattgttccgagatactacttcattttgtgatttatgtgtacgtaattttttagcataattatctttttggaatgggctatacagagatgtgctttttaaaatcgtattaatagaaaaaccttacccgatatgtctctacacgaaaaattttagttaagagtgtaaaaggacaaacagtgaaaaataaatcttcctcttatttcaattctcacattttcctgtttgtcactttttatttagaaggagaataaa

SEQ ID NO: 564 - DNA, 10075 bp, Homo sapiens
  ref <308>: DATABASE ACCESSION NUMBER: GenBank #AF377330
  ref <309>: DATABASE ENTRY DATE: 2001-06-01
taatgggttctcaaatccaaacaaaactgaccacagtcttctagaggaagtagcaaggttggctctgaagcctatagcatctctgactcagtctgtcccctggaaggctggcagctcagcaagcacagaagtctctccagaagacagtgggtcacctgcctcccaaaagctgaaaggctaacttgtactttccccagcaggcagctggcatcctgagccctcggctggggcagagcaaaggagccttcctccttcctaccttcctggcactctccctgccttccttctgtcactctcaggtggacccagacccaaggtccagatttgcaaggcaggaaaatgctgcaggcctaggctgggaaagggcccaaagccgctagtggattgctgggactcagcctcctccttcccactaagagagcgagtcctactgggttcaaaatgaccccaagccctggttcctgacactaggggaaagagatgggggtgacagaatcacagaatccctgctatgttcctccaagtgtgcccagagatgcgtgtgtgtgtgtgtgtgtatacacaaatgtctgcttatcctcaggcaggaagggtggatgcagtcatttacacatggtctgtttttctggaggacaattttatttgataaacaattgtttctatctgaatagaataaacaaggctctatgatgaagtaaaacactaaatacacatgcattaaaaaatgcataattatctttttggaatgggctatacagagatgtgctttttaaaatgttaagagtgtaaaaggacaaacagtgaaaaataaatcttcctcttattttgtcctccagtctcccaattcctctactcagaggtgagaacagaacttccacaccctccagaacctccacagttagaactgtctacatgtttccattgtctttacttttattcttgcctgcacaaataaatgaattgctcattatggaaacttcccaaaagacccgttaacacttcaataggaagcaccaacagtttatgccctaggactttgttcccacaatcctgtaacatcatatcacgacacctaacccaatccttatcaagccctgtcaaaaacggactttaaaccaagctgcaaattttcagtaatctggccttgcctttccccctctgatagcaccatcaaacaaacccccttactgccgaaagcaataagcccggctttgttccatccactggttgtgttggtgatatctggggactgccactgaacagacgcacagagggagcccctacaggcagggggtttttctgtctgtgcttctgggagagtatgtctcgtacatttgtcgcgttgatgaagacttcacagctccatcagctgcgggcaagggggtctgaggcagtcttaggcaagttggggcccagcggggagaagttgcagaagaactgattagaggaccccaggaggcttcagagctgggcgaggtagagagtctcctgtgcgccttctctcctctctgcaattcggggactccttgcactggggcaggcccccggccaggtgcatgggaggaagcacggagaatttacaagcctctcgattcctcagtccagacgctgttgggtcccctccgctggagatcgcgcttcccccaaatctttgtgagcgttgcggaagcacgcggggtccgggtcgctgagcgctgcaagacaggggagggagccgggcgggagagggaggggcggcgccggggcgggccctgatatagagcaggcgccgcgggtcgcagcacagtgcggagaccgcagccccggagcccgggccagggtccacctgtccccgcagcgccggctcgcgccctcctgccgcagccaccggtgagtgccgcggtcctgagatccccgggccggatgcgcggcggccccagctcccgagcgtctgcctcccccgccctgggctgcccgggctccctgggctccccggcggctgcacggagtcaaggcgccccgtcccgggcgtcccccgcgggtgccgatccaggctgcccggagtccggagcccagagaggagagagacagctggggagcctggtcaccgcgggcatctcccctgcgctgcagtcgcccgcctggcctgccttcccgttcctccgcctcttgccctgacttctccttcctttgcagagccgccgtctagcgccccgacctcgccaccatgagagccctgctggcgcgcctgcttctctgcgtcctggtcgtgagcgactccaaagtgagtgcgctcttgctttgactgatgctgcccaaggacctctgatcagcaccaggggagaggaggggctgctcagggagctggggtcctccggattccatccacagcagggccagactctccccaggaaatgggacagggtggcagcggaggcttgagaaccacgggggttggcactggctggcaagggaggaagaggccgccgggactgccccagcctgcgggcatctggtagatgaagcttgcttgggtcaatccatttctcctggctggaaacccatggtcttccatttgagaactagatacgaacagggtgaggcgagagggagagggaagagtgggttttgggattggggccagtttaccctcaccctggagtccctggagcatgggacctttgatgaagcctcctcccgaatctcttccagggcagcaatgaacttcatcaagttccatgtgagtatccacccctacaacagttggctgcacagacaagttgggaaggcttcaggggacatcccctccctgccctctgctgcagggctgcgccaccccttaccacttccactccccctcgcttaccccacctttgttctctccagcgaactgtgactgtctaaatggaggaacatgtgtgtccaacaagtacttctccaacattcactggtgcaactgcccaaagaaattcggagggcagcactgtgaaataggtatggggatctccactgcaactgggagagaaatttggggacagggagggatgggtgggaggcaagagcaggcaggagttaggagctggaggtagggtgggtgacatcttcatccctatgtgacaagcataaacacacacacacgctcacgaaacagtggccacacaaatgtgaggtggggttggaaggagaccctgtccagtcttctggcaggtctgaaacgacatctttaaaatgtccgttggcagccgggcatggtggctcacgcttgtaatcccagcattttgagaggtcaaggttgagtggatcatttgaggtcaggagttcaagaccagcctggacaacatggtgtaaccctgcctctactaaaaatgcaaaaatcagcctggcatggtggtggatgcctgtagtcccagctacttgggaggctgaggcaggagaattgcttgaacctgggaggcagagatctcagtgagctgagatcacaccactgcactccaactgggcgacagagcaagactccatctcaaaaaaaaaaaataaaagttagttggaatgttcttctctttctcatattctctcatcctcctgtccccttgtagataagtcaaaaacctgctatgaggggaatggtcacttttaccgaggaaaggccagcactgacaccatgggccggccctgcctgccctggaactctgccactgtccttcagcaaacgtaccatgcccacagatctgatgctcttcagctgggcctggggaaacataattactgcaggtgaggtgggggcaacaaggaccaaaagccctccctacagcttcccagaaaccttgttaccatccccttctcccagagggctggccatagcacaagagaagtgcggcctctggttgagtcttccctgaggggaggaggcagggaaggccctctgggttggaatgacatcccctatctttctgtgttgccaggaacccagacaaccggaggcgaccctggtgctatgtgcaggtgggcctaaagccgcttgtccaagagtgcatggtgcatgactgcgcagatggtgagcatcactgacctgctgatgacagtggggtggaaggggacaaacttacatgtccccttattccatcacaggaggactgaggaggtggggggtgcccgagagggatgctttctcctacctgcctccctaagacatccctctgtttgtcctccaggaaaaaagccctcctctcctccagaagaattaaaatttcagtgtggccaaaagactctgaggccccgctttaagattattgggggagaattcaccaccatcgagaaccagccctggtttgcggccatctacaggaggcaccgggggggctctgtcacctacgtgtgtggaggcagcctcatcagcccttgctgggtgatcagcgccacacactgcttcatgtacggccctgggtttctcctcttcgactcttctgccccaccccaagcacatccctttctccttcccagcaaagtgttccgcctcatttctccctcatctgcccctgtccatgcagcccatggccttggggacaagtcgtgctttgaggcctctagggagggaaggaagaagtggcagatttcatgggactaagctgtttgatgggtatcttcttccacagtgattacccaaagaaggaggactacatcgtctacctgggtcgctcaaggcttaactccaacacgcaaggggagatgaagtttgaggtggaaaacctcatcctacacaaggactacagcgctgacacgcttgctcaccacaacgacattggtgagggggaaccccgcgactactgtggccataatggcttggggagagtgggacccagggagagactggagctgaggttgaagctgcccggtggggcaggggtggggcgagggaccttgaagcctcgatatacatgacaaagggagtggcagggaagagttccatgaagtctgaggggcctggtgctcctctggagagaccctgaatttccccaacaagtagcctcttgcgagtggaaacagccctgtgggtatatggcttgggctgggaaggccctgtttatatgaattagaaaaagacacaccttcctttgtgggatgcagcctctgtctgtgctaggatatagaacttggagaatggagccttgggatggattccagcctaactacctcagctgggagtttttgcagaaacgacctgtacagctgtatgcagtggctctggccatccaagcctttttcaacacctggaacaaagcccttggggcatggggcaggggaggtttccaggtgataagcgaccagcagacctccctggatgactgacctagggataggcatagctacttcctcggcacttggaggggacagatggggaccgcctaaccagtagtgatctttctcctctgaccctctgtcctcccccagccttgctgaagatccgttccaaggagggcaggtgtgcgcagccatcccggactatacagaccatctgcctgccctcgatgtataacgatccccagtttggcacaagctgtgagatcactggctttggaaaagagaattctagtaagtgacaattgcgactgacttagaaggtcctgaggagtgttttgacctgaaaatgagcccagcgtgatcaagggaagactgcagagttagaggtgggagcactgaggcggtggcagatgggtccagggatggatgaagagtgttgtttagggagcgatgggctgcaaaggtaaatagatggtaggggctataggtggagtaaaggctcagatttgcatggaagagaataagggccttccctggtagagatactttatggttcccctctctggcagactcccagtggacagataaatcttgatgcaaacgcctccctgttttctccacctagccgactatctctatccggagcagctgaaaatgactgttgtgaagctgatttcccaccgggagtgtcagcagccccactactacggctctgaagtcaccaccaaaatgctgtgtgctgctgacccacagtggaaaacagattcctgccaggtgagtgttccaagcatctctctccacctcttccatatctccccagagctcctgggcttgttccagccagcttaagggtgtctctctctagccaaagccctaagtagccagaatcaggagctcaggtctttgagggtttaaaccagtccttatgtgtttgccagacattaccaaaaaaatcccagctctgcgctagtcacttcagactgggggcacgagatcctagaaagaggaaacagtaaaagacaatgtaactcagtgcccagggtgtgttgtgaactataaatgatcaggtgttcaggagagggaggtgagtgccaacctgagggtcagggaggggaggctttaaaggaaatgtgacttgataggcatttgaagaggcagagggaagaaaggaaggtgtttcagttgaaagatacaaaactgagaaggaggctggcatattccgggtggggaggagaactagggtctgggagtgtggatggaatagtggcagatgacagggcttttaaagccaagcaggggattttaaacttgatgtggtagaaaatggggctgcgtcaggcacagtggctcatgcctgtaatcccagcactttgggaggccgaggtggatggatcacttgaggccaggagtttgagaccggcctggccaacatggtgaaaccctgtgtctactaaaaatgcaaaaaaaaattagccaggtgtggtggtgcctgcctgtaatcccagctaatcaggaggctgagacatgggaatcgcttgagcacaggaggcaagtttgcagtgagctgagatcacgtcattgcacgccagcctgggcgacagagcgagattctgtcctccccccgaaaaaaagaaagaaaatgggaagtcgctaaggactttgactgggaaactcttccctctctctggtatggttgggtgatgggatcagaaatcccctcctcacttctctagggctcatcttttgtatctttggcgtcacagggagactcagggggacccctcgtctgttccctccaaggccgcatgactttgactggaattgtgagctggggccgtggatgtgccctgaaggacaagccaggcgtctacacgagagtctcacacttcttaccctggatccgcagtcacaccaaggaagagaatggcctggccctctgagggtccccagggaggaaacgggcaccacccgctttcttgctggttgtcatttttgcagtagagtcatctccatcagctgtaagaagagactgggaagataggctctgcacagatggatttgcctgtgccacccaccagggtgaacgacaatagctttaccctcaggcataggcctgggtgctggctgcccagacccctctggccaggatggaggggtggtcctgactcaacatgttactgaccagcaacttgtctttttctggactgaagcctgcaggagttaaaaagggcagggcatctcctgtgcatgggtgaagggagagccagctcccccgacggtgggcatttgtgaggcccatggttgagaaatgaataatttcccaattaggaagtgtaacagctgaggtctcttgagggagcttagccaatgtgggagcagcggtttggggagcagagacactaacgacttcagggcagggctctgatattccatgaatgtatcaggaaatatatatgtgtgtgtatgtttgcacacttgtgtgtgggctgtgagtgtaagtgtgagtaagagctggtgtctgattgttaagtctaaatatttccttaaactgtgtggactgtgatgccacacagagtggtctttctggagaggttataggtcactcctggggcctcttgggtcccccacgtgacagtgcctgggaatgtattattctgcagcatgacctgtgaccagcactgtctcagtttcactttcacatagatgtccctttcttggccagttatcccttccttttagcctagttcatccaatcctcactgggtggggtgaggaccactcctgtacactgaatatttatatttcactatttttatttatatttttgtaattttaaataaaagtgatcaataaaatgtgatttttctgatgacaaatctccctggtgcttgtatgggaaggagttggagtacataaaaaggagaaaataacaaaggtggactgcaccctagagtttcttatgggactgcatctctggacttaatggagctttgggaggtagaggttaggagagctgtagggcagggccaccacagcacttaatgtatacaaagtttccccaaaccacaatcccatggctgtgtaagtagtgtacaggcttagtgtcagctcccaattgcctccttaacctgatgcctttgtgcagtgcacatcttgtacagctgtacatggtggtcttctttagggttaactccacaacagtctcttcactctgcccccaacaatccttgagctgacctcaaccaagaagaacacctgtggccaggtgtagtggctcatgcctgtaatcctaacattttgagaggctgaggtgggagaatcgcttgagcccaggagtttgagaccagcctgggaaacttagtgagaccctgtctctgcaaaaaataaaaaaattagccaggtgtggtagcacatgtctgtagtcctagctacttgggaggctgaggcaggaggatcataagccaaggagttcaagtttacagtcagctgattgtgccactgcactccagcctaggtgacagagcaagaccctgtctcaaaaaaaaaaaaagaagaagaagaagaagaagacctgtaagtgaaaattgctggccaggctcagtggctcacgcctgtaatccagcactttgggaagccgaggtgtgtggatcacctgaggtcaggagtttgagaccagcctgaccaacatagtgaaaccccatctctactaaaaatacaaaaaaattagccgggtgtgggggtgggtgcctgtaatcccagctactcgggaggctgaggcaggagaatcatttgaacccgggaggcagaggttgcagtgagccgagatcgcaccactgcactccagcctgggcgacagagggaagacttcgcctcaaataaataaaaaaataaagaaagaaagaaaattgcttatccagaatgccagcttgactctgtggcattcaggaaacaaaaaacataatttcccatcatctgtgtgtgggactgatgctggaattttctcagtgtgttaacagagcttgtgaccagccattgctatgcctatgattagggggcccagaatctcaaagctggatgatgtcctaatgggggtgactatatattttgaacaaaacatcaagttctgaaaagctggggtgtagaaggcaggttgggagataattgggtatcaaaaattagaattgccaagctgtgttaatgggttggggcagtgtttcttaatcgagtcatctgaggaccttttaaaatatgcacacctacactccacctgtagagattgtgattcaggtcagggctggctccaggtctcgtggttttagaaaagctccctcagtgttactaacatgcaccactgattgacagcctttggggacaattggtcagaatatatgaagtgcccagaaaaattcaagatatggtcagcatgagttctctgcatgaacagccagttttctgagtggggtttggtggcacaaggtctcctggatttcctggttaaaggctttctggaccgtgcttccctagagggcaagaactccaagtatttggctttttcttttttttgaggcagggtctcactctgtcacccaggctggagtgcagtggcgcaatcttagctcactgcagcttctgcctcccaggttcaagcgattctcctgcctcagcctcccaagtagctgggattacaagcatgcactaccactacccggctcatttttgtgtttttggtagagatggggtttcaccctgttggccaggctggtctcgaactcccgacctcaggtgatctgcctccctt
